(19) United States
(12) Patent Application Publication
(10) Pub. No.: US 2022/0133908 A1
(43) Pub. Date: May 5, 2022

(54) CODING RNA ADMINISTERED INTO THE SUPRACHOROIDAL SPACE IN THE TREATMENT OF OPHTHALMIC DISEASES

(71) Applicant: CureVac AG, Tübingen (DE)

(72) Inventors: Joanna REJMAN, Tübingen (DE); Patrick BAUMHOF, Tübingen (DE)

(73) Assignee: CureVac AG, Tübingen (DE)

(21) Appl. No.: 17/429,182

(22) PCT Filed: Feb. 7, 2020
(86) PCT No.: PCT/EP2020/053215

§ 371 Date: Aug. 6, 2021

(30) Foreign Application Priority Data
Feb. 8, 2019 (EP) PCT/EP2019/053189

(51) Int. Cl. A61K 48/00; A61K 47/64; A61P 27/02; C07K 16/22

(52) U.S. Cl. CPC A61K 48/0041; C07K 16/22; A61P 27/02; A61K 47/6455

(57) ABSTRACT

The invention relates inter alia to compositions comprising coding RNA for use in treatment of an ophthalmic disease, disorder or condition, wherein said composition is administered into the suprachoroidal space of a subject in need of treatment. Additionally, methods of treating or preventing ophthalmic diseases, disorders or conditions are provided.

### INTRODUCTION

[0001] The invention relates inter alia to a composition comprising coding RNA for use in treatment or prevention of an ophthalmic disease, disorder or condition, wherein said composition is administered into the suprachoroidal space of a subject in need thereof. Additionally, methods of treating or preventing ophthalmic diseases, disorders or conditions are provided.

[0002] Ocular diseases are a major health problem worldwide. An ocular disease can occur in many tissues of the eye (e.g., cornea, sclera, iris and pupil, lens, ciliary muscle, ciliary body, choroid, vitreous, retina and optic nerve, macula, etc.). Ocular diseases can be caused by infections (e.g., viruses, parasites, bacteria, and fungi), cancer, genetic causes, injuries, inflammations, post-surgical complications etc.

[0003] RNA-based therapeutics can be used in e.g. passive and active immunotherapy, protein replacement therapy, or genetic engineering. Accordingly, RNA has the potential to provide highly specific and individual treatment options for the therapy of a large variety of ophthalmic diseases, disorders or conditions.

[0004] However, the effectiveness of RNA therapeutics is limited by the delivery of the RNA to the site of disease in a spatially and temporally controlled manner. Several hurdles exist in implementing an effective treatment strategy for ocular diseases and disorders, mainly due to the unique anatomy and physiology of the eye. The combination of static barriers such as different layers and regions of the eye, and dynamic barriers such as blood flow, lymphatic clearance, tear dilution, or ribonucleases, pose a significant challenge for ocular RNA drug delivery.

[0005] In most applications that require a local administration of RNA, tissue distribution may be a limiting factor. Improved tissue distribution may enable the uptake of the RNA drug by higher number of therapeutically relevant cells, which will then produce the protein encoded by the RNA (e.g. therapeutic protein, a CRISPR-associated endonuclease etc.). Usually, the levels of protein production relate closely with the numbers of transfected cells and, as a result, with the observed activity or therapeutic effect.

[0006] Improved tissue distribution is particularly relevant for medical treatments of the eye, where established methods of administration bring along some drawbacks e.g. in terms of distribution of the injected RNA within the eye.

[0007] Sub-retinal injection is an invasive method to apply the RNA underneath the retina which is accompanied by the formation of an injection bleb. In that method, the distribution of the injected RNA is largely restricted to the site of injection. Another method is the injection into the vitreous (“intravitreal”), which may lead to the deposition of RNA within the vitreous that fills the space between the lens and the retina. However, injected RNA has to diffuse through the vitreous to reach the therapeutically relevant cells (e.g. retinal cells). The vitreous humour contains no blood vessels, 98-99% of its volume is water, and has a viscosity two to four times that of water, giving it a gelatinous consistency and a charged surface. Such aspects are limiting factors for the diffusion of a potential RNA medicament within the vitreous, and therefore limit the access of RNA to cells in the posterior segment (e.g. retinal cells).

[0008] There are various pathological conditions which would highly profit if the RNA drug could be delivered to the posterior segment of the eye. Many inflammatory and proliferative diseases are associated with cells and tissues in the posterior region of the eye. In addition, many choroidal and vascular deficiencies are associated with inflammatory responses, proliferation, and neovascularization and would require long term treatment.

[0009] However, as outlined above, it is problematic to deliver effective doses of RNA to the posterior segment using conventional administration methods and routes of delivery. Accordingly, an object of the invention is to provide improved delivery and application methods for RNA or compositions comprising RNA into the eye. A further object of the invention is to provide coding RNA and compositions comprising said coding RNA suitable for ocular delivery.

[0010] The objects outlined above are solved by the claimed subject matter of the invention.

### Definitions

[0011] For the sake of clarity and readability the following definitions are provided. Any technical feature mentioned for these definitions may be read on each and every embodiment of the invention. Additional definitions and explanations may be specifically provided in the context of these embodiments.

[0012] Percentages in the context of numbers should be understood as relative to the total number of the respective items. In other cases, and unless the context dictates otherwise, percentages should be understood as percentages by weight (wt.-%).

[0013] Antibody, antibody fragment: As used herein, the term “antibody” includes both an intact antibody and an antibody fragment. Typically, an intact “antibody” is an immunoglobulin that specifically binds to a particular antigen. An antibody may be a member of any immunoglobulin class, including any of the human classes: IgG, IgM, IgE, IgA and IgD. Typically, an intact antibody is a tetramer. Each tetramer consists of two identical pairs of polypeptide chains, each pair having a “light” chain and a “heavy” chain. An “antibody fragment” includes a portion of an intact antibody, such as the antigen-binding or variable region of an antibody. Examples of antibody fragments include Fab, Fab ‘, F (ab’) 2 and Fv fragments; the tribes; Tetra; linear antibodies; single-chain antibody molecules; and multi specific antibodies formed from antibody fragments. E.g., the antibody fragments comprise isolated fragments, “Fv” fragments consisting of heavy and light chain variable regions, recombinant single chain polypeptide molecules in which the light and heavy chain variable regions are linked together by a peptide linker (“ScFv Proteins”) and minimal recognition units consisting of amino acid residues that mimic the hypervariable region. Examples of antigen-binding fragments of an antibody include, but are not limited to, Fab fragment, Fab ‘fragment, F (ab′) 2 fragment, scFv fragment, Fv fragment, dsFv diabody, dAb fragment, fragment Fd’, Fd fragment and an isolated complementarity determining region (CDR). Suitable antibodies that may be encoded by the coding RNA of the invention include monoclonal antibodies, polyclonal antibodies, antibody mixtures or cocktails, human or humanized antibodies, chimeric antibodies, Fab fragments, or bispecific antibodies.

[0014] Cationic, cationisable: Unless a different meaning is clear from the specific context, the term “cationic” means that the respective structure bears a positive charge, either permanently or not permanently but in response to certain conditions such as e.g. pH. Thus, the term “cationic” covers both “permanently cationic” and “cationisable”. The term “cationisable” as used herein means that a compound, or group or atom, is positively charged at a lower pH and uncharged at a higher pH of its environment. Also in non-aqueous environments where no pH value can be determined, a cationisable compound, group or atom is positively charged at a high hydrogen ion concentration and uncharged at a low concentration or activity of hydrogen ions. It depends on the individual properties of the cationisable or polycationisable compound, in particular the pKa of the respective cationisable group or atom, at which pH or hydrogen ion concentration it is charged or uncharged. In diluted aqueous environments, the fraction of cationisable compounds, groups or atoms bearing a positive charge may be estimated using the so-called Henderson-Hasselbalch equation which is well-known to a person skilled in the art. E.g., if a compound or moiety is cationisable, it is preferred that it is positively charged at a pH value of about 1 to 9, preferably 4 to 9, 5 to 8 or even 6 to 8, more preferably of a pH value of or below 9, of or below 8, of or below 7, most preferably at physiological pH values, e.g. about 7.3 to 7.4, i.e. under physiological conditions, particularly under physiological salt conditions of the cell in vivo. In embodiments, it is preferred that the cationisable compound or moiety is predominantly neutral at physiological pH values, e.g. about 7.0-7.4, but becomes positively charged at lower pH values. In some embodiments, the preferred range of pKa for the cationisable compound or moiety is about 5 to about 7.

[0015] Derived from: The term “derived from” as used throughout the present specification in the context of a nucleic acid, i.e. for a nucleic acid “derived from” (another) nucleic acid, means that the nucleic acid, which is derived from (another) nucleic acid, shares e.g. at least about 70%, 80%, 85%, 86%, 87%, 88%, 89%, 90%, 91%, 92%, 93%, 94%, 95%, 96%, 97%, 98%, or about 99% sequence identity with the nucleic acid from which it is derived. The skilled person is aware that sequence identity is typically calculated for the same types of nucleic acids, i.e. for DNA sequences or for RNA sequences. Thus, it is understood, if a DNA is “derived from” an RNA or if an RNA is “derived from” a DNA, in a first step the RNA sequence is converted into the corresponding DNA sequence (in particular by replacing the uracils (U) by thymidines (T) throughout the sequence) or, vice versa, the DNA sequence is converted into the corresponding RNA sequence (in particular by replacing the T by U throughout the sequence). Thereafter, the sequence identity of the DNA sequences or the sequence identity of the RNA sequences is determined. Preferably, a nucleic acid “derived from” a nucleic acid also refers to nucleic acid, which is modified in comparison to the nucleic acid from which it is derived, e.g. in order to increase RNA stability even further and/or to prolong and/or increase protein production. In the context of amino acid sequences, the term “derived from” means that the amino acid sequence, which is derived from (another) amino acid sequence, shares e.g. at least about 70%, 80%, 85%, 86%, 87%, 88%, 89%, 90%, 91%, 92%, 93%, 94%, 95%, 96%, 97%, 98%, or about 99% sequence identity with the amino acid sequence from which it is derived. Thus, it is understood, if e.g. a protein is “derived from” a certain protein, the protein that is “derived from” may represent a variant or fragment of said respective protein, sharing a certain percentage of sequence identity.

[0016] CRISPR-associated protein: The term “CRISPR-associated protein” will be recognized and understood by the person of ordinary skill in the art. The term “CRISPR-associated protein” refers to RNA-guided endonucleases that are part of a CRISPR (Clustered Regularly Interspaced Short Palindromic Repeats) system (and their homologs, variants, fragments or derivatives), which is used by prokaryotes to confer adaptive immunity against foreign DNA elements. CRISPR-associated proteins include, without limitation, Cas9, Cpf1 (Cas12), C2c1, C2c3, C2c2, Cas13, CasX and CasY. As used herein, the term “CRISPR-associated protein” includes wild-type proteins as well as homologs, variants, fragments and derivatives thereof. Therefore, when referring to artificial nucleic acid molecules encoding Cas9, Cpf1 (Cas12), C2c1, C2c3, and C2c2, Cas13, CasX and CasY, said artificial nucleic acid molecules may encode the respective wild-type proteins, or homologs, variants, fragments and derivatives thereof. Besides Cas9 and Cas12 (Cpf1), several other CRISPR-associated protein exist that are suitable for genetic engineering in the context of the invention, including Cas13, CasX and CasY; e.g. Cas13 i.e. WP15770004, WP18451595, WP21744063, WP21746774, ERK53440, WP31473346, CVRQ01000008, CRZ35554, WP22785443, WP36091002, WP12985477, WP13443710, ETD76934, WP38617242, WP2664492, WP4343973, WP44065294, ADAR2DD, WP47447901, ERI81700, WP34542281, WP13997271, WP41989581, WP47431796, WP14084666, WP60381855, WP14165541, WP63744070, WP65213424, WP45968377, EH006562, WP6261414, EKB06014, WP58700060, WP13446107, WP44218239, WP12458151, ERJ81987, ERJ65637, WP21665475, WP61156637, WP23846767, ERJ87335, WP5873511, WP39445055, WP52912312, WP53444417, WP12458414, WP39417390, E0A10535, WP61156470, WP13816155, WP5874195, WP39437199, WP39419792, WP39431778, WP46201018, WP39442171, WP39426176, WP39418912, WP39434803, WP39428968, WP25000926, EFU31981, WP4343581, WP36884929, BAU18623, AFJ07523, WP14708441, WP36860899, WP61868553, KJJ86756, EGQ18444, EKY00089, WP36929175, WP7412163, WP44072147, WP42518169, WP44074780, WP15024765, WP49354263, WP4919755, WP64970887, WP61710138); CasX (i.e. OGP07438, OHB99618); CasY (i.e. OJ108769, OGY82221, OJ106454, APG80656, OJ107455, OJ109436, PIP58309).

[0017] Guide RNA: As used herein, the term “guide RNA” (gRNA) thus relates to any RNA molecule capable of targeting a CRISPR-associated protein as defined above to a target DNA sequence of interest. In the context of the invention, the term guide RNA has to be understood in its broadest sense, and may comprise two-molecule gRNAs (“tracrRNA/crRNA”) comprising crRNA (“CRISPR RNA” or “targeter-RNA” or “crRNA” or “crRNA repeat”) and a corresponding tracrRNA (“trans-acting CRISPR RNA” or “activator-RNA” or “tracrRNA”) molecule, or single-molecule gRNAs. A “sgRNA” typically comprises a crRNA connected at its 3′ end to the 5′ end of a tracrRNA through a “loop” sequence.

[0018] Fragment: The term “fragment” as used throughout the present specification in the context of a nucleic acid sequence or an amino acid (aa) sequence may typically be a shorter portion of a full-length sequence of e.g. a nucleic acid sequence or an amino acid sequence. A fragment typically consists of a sequence that is identical to the corresponding stretch within the full-length sequence. The term “fragment” as used throughout the present specification in the context of proteins or peptides may, typically, comprise a sequence of a protein or peptide as defined herein, which is, with regard to its amino acid sequence (or its encoded nucleic acid molecule), N-terminally and/or C-terminally truncated compared to the amino acid sequence of the original (native) protein (or its encoded nucleic acid molecule). Such truncation may thus occur either on the aa level or correspondingly on the nucleic acid level. A sequence identity with respect to such a fragment as defined herein may therefore preferably refer to the entire protein or peptide as defined herein or to the entire (coding) nucleic acid molecule of such a protein or peptide. Fragments of antigenic proteins or peptides may comprise at least one epitope of those proteins or peptides. Furthermore also domains of a protein, like the extracellular domain, the intracellular domain or the transmembrane domain and shortened or truncated versions of a protein may be understood to comprise a fragment of a protein.

[0019] Heterologous: The terms “heterologous” or “heterologous sequence” as used throughout the present specification in the context of a nucleic acid sequence or an amino acid sequence refers to a sequence (e.g. DNA, RNA, amino acid) will be recognized and understood by the person of ordinary skill in the art, and is intended to refer to a sequence that is derived from another gene, from another allele, from another species. Two sequences are typically understood to be “heterologous” if they are not derivable from the same gene or in the same allele. I.e., although heterologous sequences may be derivable from the same organism, they naturally (in nature) do not occur in the same nucleic acid molecule, such as e.g. in the same RNA or protein.

[0020] Identity (of a sequence): The term “identity” as used throughout the present specification in the context of a nucleic acid sequence or an amino acid sequence will be recognized and understood by the person of ordinary skill in the art, and is e.g. intended to refer to the percentage to which two sequences are identical. To determine the percentage to which two sequences are identical, e.g. nucleic acid sequences or aa sequences as defined herein, preferably the aa sequences encoded by the nucleic acid sequence as defined herein or the aa sequences themselves, the sequences can be aligned in order to be subsequently compared to one another. Therefore, e.g. a position of a first sequence may be compared with the corresponding position of the second sequence. If a position in the first sequence is occupied by the same residue as is the case at a position in the second sequence, the two sequences are identical at this position. If this is not the case, the sequences differ at this position. If insertions occur in the second sequence in comparison to the first sequence, gaps can be inserted into the first sequence to allow a further alignment. If deletions occur in the second sequence in comparison to the first sequence, gaps can be inserted into the second sequence to allow a further alignment. The percentage to which two sequences are identical is then a function of the number of identical positions divided by the total number of positions including those positions which are only occupied in one sequence. The percentage to which two sequences are identical can be determined using an algorithm, e.g. an algorithm integrated in the BLAST program.

[0021] Nucleic acid: The terms “nucleic acid” or “nucleic acid molecule” will be recognized and understood by the person of ordinary skill in the art, and are e.g. intended to refer to a molecule comprising, preferably consisting of nucleic acid components. The term nucleic acid molecule preferably refers to DNA or RNA. It is preferably used synonymous with the term polynucleotide. Preferably, a nucleic acid or a nucleic acid molecule is a polymer comprising or consisting of nucleotide monomers (natural and/or modified), which are covalently linked to each other by phosphodiester-bonds of a sugar/phosphate-backbone. The term “nucleic acid molecule” also encompasses modified nucleic acid molecules, such as base-modified, sugar-modified or backbone-modified DNA or RNA (e.g. coding RNA) molecules as defined herein.

[0022] “Ophthalmic disease disorder or condition” or “ocular disease, disorder or condition”: The terms “Ophthalmic disease disorder or condition” or “ocular disease, disorder or condition” will be recognized and understood by the person of ordinary skill in the art, and are e.g. intended to refer to a disease, disorder or condition affecting the eye and/or vision. Ocular/ophthalmic diseases, disorders or conditions can affect one or more of the following parts of the eye: eyelid, lacrimal system and orbit; conjunctiva; sclera, cornea, iris and ciliary body; lens; choroid and retina; vitreous body and globe; optic nerve and visual pathways; and ocular muscles. For example, an ocular or ophthalmic disease, disorder or condition may be caused by a protein deficiency or dysfunctions in the eye or parts of the anatomy associated with vision. An ocular/ophthalmic disease, disorder or condition may be caused by a protein surplus, over expression, and/or over activation in the eye or parts of the anatomy associated with vision.

[0023] Nucleic acid sequence/RNA sequence/amino acid sequence: The terms “nucleic acid sequence”, “RNA sequence” or “amino acid sequence” will be recognized and understood by the person of ordinary skill in the art, and are e.g. intended to refer to particular and individual order of the succession of its nucleotides or amino acids respectively.

[0024] About: The term “about” is used when determinants do not need to be identical, i.e. 100% the same. Accordingly, “about” means, that a determinants may diverge by 0.1% to 20%, preferably by 0.1% to 10%; in particular, by 0.5%, 1%, 2%, 3%, 4%, 5%, 6%, 7%, 8%, 9%, 10%, 11%, 12%, 13%, 14%, 15%, 16%, 17%, 18%, 19%, 20%. The skilled person will know that e.g. certain parameters or determinants may slightly vary based on the method how the parameter was determined.

[0025] Variant (of a sequence): The term “variant” as used throughout the present specification in the context of a nucleic acid sequence will be recognized and understood by the person of ordinary skill in the art, and is e.g. intended to refer to a variant of a nucleic acid sequence derived from another nucleic acid sequence. E.g., a variant of a nucleic acid sequence may exhibit one or more nucleotide deletions, insertions, additions and/or substitutions compared to the nucleic acid sequence from which the variant is derived. A variant of a nucleic acid sequence may at least 50%, 60%, 70%, 80%, 90%, or 95% identical to the nucleic acid sequence the variant is derived from. The variant is a functional variant in the sense that the variant has retained at least 50%, 60%, 70%, 80%, 90%, or 95% or more of the function of the sequence where it is derived from. A “variant” of a nucleic acid sequence may have at least 70%, 75%, 80%, 85%, 90%, 95%, 98% or 99% nucleotide identity over a stretch of at least 10, 20, 30, 50, 75 or 100 nucleotide of such nucleic acid sequence.

[0026] The term “variant” as used throughout the present specification in the context of proteins or peptides will be recognized and understood by the person of ordinary skill in the art, and is e.g. intended to refer to a proteins or peptide variant having an amino acid sequence which differs from the original sequence in one or more mutation(s), such as one or more substituted, inserted and/or deleted amino acid(s). Preferably, these fragments and/or variants have the same biological function or specific activity compared to the full-length native protein, e.g. its specific antigenic property. “Variants” of proteins or peptides as defined herein may comprise conservative amino acid substitution(s) compared to their native, i.e. non-mutated physiological, sequence. Those amino acid sequences as well as their encoding nucleotide sequences in particular fall under the term variants as defined herein. Substitutions in which amino acids, which originate from the same class, are exchanged for one another are called conservative substitutions. In particular, these are amino acids having aliphatic side chains, positively or negatively charged side chains, aromatic groups in the side chains or amino acids, the side chains of which can enter into hydrogen bridges, e.g. side chains which have a hydroxyl function. This means that e.g. an amino acid having a polar side chain is replaced by another amino acid having a likewise polar side chain, or, e.g., an amino acid characterized by a hydrophobic side chain is substituted by another amino acid having a likewise hydrophobic side chain (e.g. serine (threonine) by threonine (serine) or leucine (isoleucine) by isoleucine (leucine)). Insertions and substitutions are possible, in particular, at those sequence positions which cause no modification to the three-dimensional structure or do not affect the binding region. Modifications to a three-dimensional structure by insertion(s) or deletion(s) can easily be determined e.g. using CD spectra (circular dichroism spectra). A “variant” of a protein or peptide may have at least 70%, 75%, 80%, 85%, 90%, 95%, 98% or 99% amino acid identity over a stretch of at least 10, 20, 30, 50, 75 or 100 amino acids of such protein or peptide. Preferably, a variant of a protein comprises a functional variant of the protein, which means that the variant exerts the same effect or functionality or at least 40%, 50%, 60%, 70%, 80%, 90%, or 95% of the effect or functionality as the protein it is derived from.

### SHORT DESCRIPTION OF THE INVENTION

[0027] The present invention is based on the finding that a protein, e.g. a therapeutic protein, encoded by a coding RNA of the invention can efficiently be expressed in a mammalian eye upon administration of said RNA into the suprachoroidal space (SCS). That was surprising, as the art taught that the SCS delivery route would be merely suitable for small molecules, and therefore not preferable for large molecules, as rapid clearance of larger molecules (such as RNA) may occur. For example, Olsen et al showed that large biological agents have a more rapid clearance from the SCS than comparable intravitreal injections of the same agent (see Olsen, Timothy W., et al., Investigative ophthalmology & visual science 52.7 (2011): 4749-4756). A composition comprising coding RNA preferably in association or in complexation with e.g. a polymeric carrier, a polycationic protein or peptide, a lipid nanoparticle (LNP), or a liposome, resulted in expression and activity of an encoded protein in the cells of the eye after administration into the SCS (see Example 2). As described herein including in the examples, the inventors have successfully delivered coding RNA via the SCS, resulting in robust protein expression in the eye. Example 3 shows that therapeutically relevant cell types (e.g. retinal cells, photoreceptors) were transfected using after administration of a long coding RNA into the SCS (see Example 3). The inventors have demonstrated, for the first time, that delivery into the SCS may be used to effectively deliver coding RNA encoding therapeutic proteins or antigenic proteins into the eye, providing an effective yet unexpected solution for this difficult problem of ocular RNA delivery. Moreover, the finding that therapeutically relevant cell types can be transfected with coding RNA opens as yet unexpected treatment options for various diseases associated with defects or deficiencies of cells in the retina (e.g. photoreceptors).

[0028] In a first aspect, the present invention relates to a composition comprising at least one coding RNA comprising at least one coding sequence encoding at least one peptide or protein for use in treatment or prevention of an ophthalmic disease, disorder or condition, wherein said composition is administered into the SCS to a subject in need thereof.

[0029] In a second aspect, the present invention relates to a kit or kit of parts, preferably for use in treatment or prevention of an ophthalmic disease, disorder or condition, wherein said kit or kit of parts for use comprises at least one composition for use according to the first aspect, and optionally, a liquid vehicle for solubilising, and/or technical instructions providing information on administration and dosage of the components.

[0030] In a third aspect, the invention relates to a method of treating or preventing of an ophthalmic disease, disorder or condition, wherein the method comprises applying or administering to a subject in need thereof the composition of the first aspect, or the kit or kit of parts of the second aspect via administration into the SCS. In particular, a method for gene therapy is provided, wherein the method comprises applying or administering to a subject in need thereof a composition comprising a coding RNA encoding at least one CRISPR-associated endonuclease, and, optionally, at least one guide RNA, via administration into the SCS.

[0031] In a fourth aspect, the present invention relates to a method of delivering a coding RNA molecule to cells and/or tissues of the eye of a subject, wherein delivering is performed via administration into the SCS.

### DETAILED DESCRIPTION OF THE INVENTION

[0032] The present application is filed together with a sequence listing in electronic format, which is part of the description of the present application (WIPO standard ST.25). The information contained in the electronic format of the sequence listing filed together with this application is incorporated herein by reference in its entirety. For many sequences, the sequence listing also provides additional detailed information, e.g. regarding certain structural features, sequence optimizations, GenBank identifiers, or additional detailed information regarding its coding capacity. In particular, such information is provided under numeric identifier <223> in the WIPO standard ST.25 sequence listing. Accordingly, information provided under said numeric identifier <223> is explicitly included herein in its entirety and has to be understood as integral part of the description of the underlying invention.

[0033] Composition for use in treatment or prevention of an ophthalmic disease, disorder, or condition In a first aspect, the invention is inter alia directed to a composition comprising at least one coding RNA, wherein said at least one coding RNA comprises at least one coding sequence encoding at least one peptide or protein for use in treatment or prevention of an ophthalmic disease, disorder or condition, wherein said composition is administered into the SCS to a subject in need thereof.

[0034] The term “treatment” or “treating” of a disease, disorder or condition includes preventing or protecting against the disease, disorder or condition (that is, causing the clinical symptoms not to develop); inhibiting the disease, disorder or condition (i.e., arresting/suppressing the development of clinical symptoms); and/or relieving the disease, disorder or condition (i.e., causing the regression of clinical symptoms). As will be appreciated, it is not always possible to distinguish between “preventing” and “suppressing” a disease, disorder or condition since the ultimate inductive event or events may be unknown or latent. Accordingly, the term “prophylaxis” will be understood to constitute a type of “treatment” that encompasses “preventing” and “suppressing.” The term “treatment” thus also includes “prophylaxis”. The term “treatment” also includes prevention”.

[0035] As used herein, “ocular tissue” and “eye” include both the anterior segment of the eye (i.e., the portion of the eye in front of the lens) and the posterior segment of the eye (i.e., the portion of the eye behind the lens) as shown in FIG. 1. The eye includes both, an anterior region or segment 12 (the portion of the eye in front of and including the lens) and a posterior region or segment 14 (the portion of the eye behind the lens). The anterior segment 12 is bounded by the cornea 16 and the lens 18, while the posterior segment 14 is bounded by the sclera 20 and the lens 18. The anterior segment 12 is further subdivided into the anterior chamber 22, between the iris 24 and the cornea 16, and the posterior chamber 26, between the lens 18 and the iris 24. The cornea 16 and the sclera 20 collectively form a limbus 38 at the point at which they meet. The exposed portion of the sclera 20 on the anterior segment 12 of the eye is protected by a clear membrane referred to as the conjunctiva 45. Underlying the sclera 20 is the choroid 28 and the retina 27, collectively referred to as retina choroidal tissue. A vitreous humour 30 (also referred to as the “vitreous”) is disposed between a ciliary body 32 (including a ciliary muscle and a ciliary process) and the retina 27. The anterior portion of the retina 27 forms an ora serrata 34. The loose connective tissue, or potential space, between the choroid 28 and the sclera 20 is referred to as the suprachoroid, comprising the suprachoroidal space (SCS) 36.

[0036] The term “suprachoroidal space” is used interchangeably with suprachoroidal, SCS, suprachoroid and suprachoroidia. The SCS extends from the anterior portion of the eye posterior to the ciliary body to the posterior portion of the eye up to the optic nerve, traversing the circumference of the posterior segment of the eye. The SCS is a space in the eye located between the choroid (the vascular layer of the eye) and the sclera (the outer layer of the eye). As shown in FIG. 2, the sclera 20 with surrounding Tenon's Capsule 46 or conjunctiva 45, SCS 36, choroid 28, and retina 27, substantially without fluid and/or tissue separation in the SCS 36.

[0037] The coding RNA that is to be administered as a composition into the SCS may be most effective as the coding RNA can be delivered directly, close to, or adjacent to the part of the eye that requires a therapeutic treatment, such as, e.g., the choroid or retina (e.g., for targeting diseases of the posterior segment or region, see for reference FIG. 1).

[0038] The delivery of RNA macromolecules to the eye is extremely difficult, particularly delivery of an RNA macromolecule to the posterior segment or posterior region. Many inflammatory and proliferative diseases in the posterior region of the eye require long term pharmacological treatment. In addition, many choroidal maladies that are associated with inflammatory responses, proliferation, and neovascularization require long term treatment. It is difficult to deliver effective doses of RNA to the posterior segment using conventional delivery methods and routes of delivery. Administration of a composition comprising RNA to the SCS may enable access to posterior segment ocular tissue while limiting exposure, and potential side effects, to the anterior segment, and other areas of the eye. SCS delivery may also avoid direct entry into the eye (e.g. intravitreal injection, sub-retinal injection) and decreases the risks for endophthalmitis, retinal detachment, and potentially cataract formation. Accordingly, SCS administration of a composition comprising RNA may result in improved expression and/or improved activity of the encoded peptide or protein in the eye, wherein said delivery route has superior safety characteristics as compared to classical routes. Not wishing to be bound by theory, it is believed that upon entering the SCS, the composition comprising coding RNA flows circumferentially from the insertion site toward e.g. the retinochoroidal tissue, macula, and optic nerve in the posterior segment of the eye as well as anteriorly toward the uvea and ciliary body. In addition, a portion of the administered composition comprising at least one coding RNA may remain in the SCS as a depot, or remain in tissue overlying the SCS, e.g. the sclera, near the microneedle insertion site, serving as additional depot of the drug formulation that subsequently can diffuse into the SCS and into other adjacent posterior tissues.

[0039] In preferred embodiments, SCS administration of the composition for use may result in (improved) expression and/or (improved) activity of the encoded peptide or protein in cells and/or tissues of the eye.

[0040] In preferred embodiments, SCS administration of the composition for use may result in expression of the coding RNA and hence to a measurable amount of peptide or protein in cells and/or tissues of the eye.

[0041] The term “expression” has to be understood as translation of the administered coding RNA of the composition into measurable amounts of protein. Protein levels may be detected by various methods in the art, including antibody based detection methods or mass spectrometry. In embodiments, expression of the encoded peptide or protein is essentially restricted to the eye. Accordingly, it is preferred that SCS administration of the composition for use results in expression and hence to a measurable amount of peptide or protein in the eye.

[0042] The term “activity” has to be understood as a result of the expressed coding RNA (that is provided by the composition for use of the first aspect). In the context of the invention, activity may be determined by biological assays or animal studies. E.g., the activity of a Cas9 protein may be determined by analyzing the occurrence of genetic repair in the treated eye. In embodiments, activity of the encoded peptide or protein is essentially restricted to the eye. Accordingly, it is preferred that SCS administration of the composition for use results in activity of the encoded peptide or protein in the eye.

[0043] Preferably, expression and/or activity may be in cells or tissues in the back of the eye or the posterior segment.

[0044] The posterior segment of the eye encompasses, without limitation, sclera, choroid, retina, Bruch's membrane, vitreous humor, optic nerve, and retinal blood vessels.

[0045] Accordingly, cells and tissues located in the posterior segment of the eye that may be addressed via SCS delivery of the composition may comprise sclera, choroid, retina, optic nerve, macula, scleral cells, choroid plexus epithelial cells, retinal cells (photoreceptors, bipolar cells, ganglion cells, horizontal cells, and amacrine cells), retinal pigment epithelium, bruch's membrane, or retinal blood vessels.

[0046] In preferred embodiments, administration of the composition for use via SCS may result in expression of the peptide or protein (provided by the coding RNA of the composition) mainly located or essentially restricted to therapeutically relevant cells or tissues, including e.g. the choroid, or choroidal tissues, retinal cells, retinal pigment epithelium, Bruch's membrane, while maintaining low levels of expression in other tissues or cells in the eye.

[0047] In embodiments, administration of the composition comprising coding RNA for use via SCS may result in expression of the peptide or protein that is substantially increased compared to intravitreal and/or sub-retinal administration.

[0048] In embodiments, administration of the composition comprising coding RNA for use via SCS may result in expression of the encoded peptide or protein that is more restricted to the therapeutically relevant cells compared to intravitreal administration and/or sub-retinal administration.

[0049] In preferred embodiments, the composition for use is administered into the SCS, wherein administration of the composition leads to translation of the encoded peptide or protein, thereby exerting a therapeutic effect.

[0050] Therapeutic effects in that context may be reduced neovascularization, reduced inflammation, neuroprotection, complement inhibition, reduced drusen formation, reduced scar formation, and/or reduction in choriocapillaris.

[0051] In preferred embodiments, the invention relates to a composition comprising at least one coding RNA comprising at least one coding sequence encoding at least one therapeutic peptide or protein for use in treatment or prevention of an ophthalmic disease, disorder or condition, wherein said composition is administered into the SCS to a subject in need thereof, wherein administration of said composition leads to reduced neovascularization. In preferred embodiments, the invention relates to a composition comprising at least one coding RNA comprising at least one coding sequence encoding at least one therapeutic peptide or protein for use in treatment or prevention of an ophthalmic disease, disorder or condition, wherein said composition is administered into the SCS to a subject in need thereof, wherein administration of said composition leads to reduced inflammation. In preferred embodiments, the invention relates to a composition comprising at least one coding RNA comprising at least one coding sequence encoding at least one therapeutic peptide or protein for use in treatment or prevention of an ophthalmic disease, disorder or condition, wherein said composition is administered into the SCS to a subject in need thereof, wherein administration of said composition leads to neuroprotection. In preferred embodiments, the invention relates to a composition comprising at least one coding RNA comprising at least one coding sequence encoding at least one therapeutic peptide or protein for use in treatment or prevention of an ophthalmic disease, disorder or condition, wherein said composition is administered into the SCS to a subject in need thereof, wherein administration of said composition leads to complement inhibition. In preferred embodiments, the invention relates to a composition comprising at least one coding RNA comprising at least one coding sequence encoding at least one therapeutic peptide or protein for use in treatment or prevention of an ophthalmic disease, disorder or condition, wherein said composition is administered into the SCS to a subject in need thereof, wherein administration of said composition leads to reduced drusen formation. In preferred embodiments, the invention relates to a composition comprising at least one coding RNA comprising at least one coding sequence encoding at least one therapeutic peptide or protein for use in treatment or prevention of an ophthalmic disease, disorder or condition, wherein said composition is administered into the SCS to a subject in need thereof, wherein administration of said composition leads to reduced scar formation. In preferred embodiments, the invention relates to a composition comprising at least one coding RNA comprising at least one coding sequence encoding at least one therapeutic peptide or protein for use in treatment or prevention of an ophthalmic disease, disorder or condition, wherein said composition is administered into the SCS to a subject in need thereof, wherein administration of said composition leads to reduction in choriocapillaris.

[0052] In preferred embodiments, the ophthalmic disease, disorder or condition may be neovascularization, retinal degenerative disease, diabetic eye disease, retinal detachment, optic nerve disease, endocrine disorders, cancer disease, infectious disease, parasitic disease, in particular, pigmentary uveitis (PU), branch retinal vein occlusion (BRVO), central retinal vein occlusion (CRVO), macular edema, cystoid macular edema (CME), uveitic macular edema (UME), cytomegalovirus retinitis, endophthalmitis, scleritis, choriotetinitis, dry eye syndrome, Norris disease, Coats disease, persistent hyperplastic primary vitreous, familial exudative vitreoretinopathy, Leber congenital amaurosis, X-linked retinoschisis, Leber's hereditary optic neurophathy, uveitis, refraction and accommodation disorders, keratoconus, amblyopia, conjunctivitis, corneal ulcers, dacryocystitis, Duane retraction syndrome, optic neuritis, ocular inflammation, glaucoma, macular degeneration, and uveitis, or any disease, disorder or condition related or associated thereto.

[0053] In preferred embodiments, the composition for use is administered into the SCS, wherein the ophthalmic disease, disorder or condition is selected from neovascularization, retinal degenerative disease, diabetic eye disease, retinal detachment, or a cancer disease.

[0054] In preferred embodiments, the neovascularization is choroidal neovascularization or retinal neovascularization or a related disease, disorder or condition.

[0055] In preferred embodiments, the retinal degenerative disease is age-related macular degeneration (AMD), dry age-related macular degeneration (dry AMD), wet age-related macular degeneration (wet AMD), Stargardt disease, or retinitis pigmentosa (RP), or a related disease, disorder or condition.

[0056] In preferred embodiments, the diabetic eye disease is diabetic retinopathy, diabetic macular edema (DME), cataract, and/or glaucoma, or a related disease, disorder or condition.

[0057] In preferred embodiments, retinal detachment is from the rhegmatogenous type, the tractional type, and/or the exudative type, or a related disease, disorder or condition.

[0058] In embodiments, the cancer disease is melanoma, intraocular lymphoma, Retinoblastoma, choroidal metastasis derived from primary lung cancer, choroidal metastasis derived from primary kidney cancer, choroidal metastasis derived from primary prostate cancer, choroidal metastasis derived from primary breast cancer, metastatic melanomas, or a related disease, disorder or condition.

[0059] Further cancer diseases may be eyelid tumors, conjunctival/corneal cancers, uveal cancers, retinal cancers, and orbital/adnexal cancers, in particular Squamous cell carcinoma, squamous neoplasia, Intraocular Melanoma or

[0060] Retinoblastoma, Sebaceous Carcinoma of the eyelid, Uveal melanoma, iris melanoma, ciliary body melanoma, and choroidal melanoma, or tumor antigens causing a cancer with metastases in the eye (e.g. choroidal metastases, ocular metastases, orbital metastases).

[0061] In embodiments, the at least one coding sequence (cds) encodes at least one peptide or protein, wherein said at least one peptide or protein is a therapeutic peptide or protein.

[0062] In various embodiments, the length of the encoded peptide or protein may be at least or greater than about 20, 30, 40, 50, 60, 70, 80, 90, 100, 150, 200, 250, 300, 400, 500, 600, 700, 800, 900, 1000, or 1500 amino acids.

[0063] In preferred embodiments, the at least one cds encodes at least one therapeutic peptide or protein, wherein said therapeutic peptide or protein may be derived from an antibody, an antibody fragment, an intrabody, a receptor, a binding protein, a CRISPR-associated endonuclease, a transcription factor, an enzyme, a growth factor, a structural protein, cytoplasmic or cytoskeletal proteins, or fragments, variants, or combinations of any of these.

[0064] In preferred embodiments, the at least one cds encodes at least one therapeutic peptide or protein, wherein said therapeutic peptide or protein is derived from a CRISPR-associated endonuclease, wherein said CRISPR-associated endonuclease is selected from Cas9, Cpf1, C2c1, C2c3, and C2c2, Cas13, CasX and CasY.

[0065] In preferred embodiments, the at least one cds encodes at least one therapeutic peptide or protein, wherein said therapeutic peptide or protein is derived from an antibody, an antibody fragment, wherein said antibody, or antibody fragment is against a platelet derived growth factor (PEDF) or a vascular endothelial growth factor (VEGF).

[0066] In preferred embodiments, the at least one cds encodes at least one therapeutic peptide or protein, wherein said therapeutic peptide or protein may be derived from an antibody, an antibody fragment, an intrabody, a receptor, a binding protein, a CRISPR-associated endonuclease, a transcription factor, an enzyme, a growth factor, a structural protein, cytoplasmic or cytoskeletal proteins, or fragments, variants, or combinations of any of these.

[0067] In embodiments, the at least one coding RNA of the composition encodes an antibody, an antibody fragment, an intrabody, a receptor, a binding protein, a CRISPR-associated endonuclease, a transcription factor, an enzyme, a growth factor, and/or a structural protein thereby inhibiting, down-regulating, or reducing a protein that is present in excess amount and/or excess activity in an ocular disease, disorder or condition (as defined above).

[0068] In other embodiments, the at least one coding RNA of the composition encodes an antibody, an antibody fragment, an intrabody, a receptor, a binding protein, a CRISPR-associated endonuclease, a transcription factor, an enzyme, a growth factor, and/or a structural protein thereby activating, up-regulating or increasing a protein activity that deficient and/or present in low amount and/or low activity in an ocular disease, disorder or condition (as defined above).

[0069] Suitably, the coding RNA comprised in the composition for use encodes at least one therapeutic protein as provided in List 1 below. Therein, Protein/Gene Symbol and the corresponding Name (Symbol: Name) are provided.

[0070] List 1: Suitable Therapeutic Proteins Provided by the Coding RNA of the Invention

[0071] ABCA4: ATP binding cassette subfamily A member 4; ADRB1: adrenoceptor beta 1; ANGPT1: angiopoietin 1; ANGPT2: angiopoietin 2; BEST1: bestrophin 1; CCR3: C-C motif chemokine receptor 3; CD276: CD276 molecule; CD59: CD59 molecule (CD59 blood group); CFD: complement factor D; CHM: CHM, Rab escort protein 1; CHST4: carbohydrate sulfotransferase 4; CNR1: cannabinoid receptor 1; CNTF: ciliary neurotrophic factor; CRYAA: crystallin alpha A; CRYAB: crystallin alpha B; CSF3R: colony stimulating factor 3 receptor; DCN: decorin; DICER1: dicer 1, ribonuclease III; DRD2: dopamine receptor D2; EGFR: epidermal growth factor receptor; EGLN1: egl-9 family hypoxia inducible factor 1; ENG: endoglin; FLT1: fms related tyrosine kinase 1; FLT1(1-758): fms related tyrosine kinase 1 (secreted); FLT1-iso3(sFlt1-14): fms related tyrosine kinase 1 isoform 3 (secreted; P17948-3); FLT1-iso2(sFlt1): fms related tyrosine kinase 1 isoform 2 (secreted; P17948-2); FLT1-iso4: fms related tyrosine kinase 1 isoform 4 (secreted; P17948-4); GUCY1A1: guanylate cyclase 1 soluble subunit alpha 1; GUCY1A2: guanylate cyclase 1 soluble subunit alpha 2; GUCY1B1: guanylate cyclase 1 soluble subunit beta 1; GUCY1B2: guanylate cyclase 1 soluble subunit beta 2 (pseudogene); GUCY2D: guanylate cyclase 2D, retinal; GUCY2F: guanylate cyclase 2F, retinal; HEY1: hes related family bHLH transcription factor with YRPW motif 1; HEPH: hephaestin; HEPHL1: hephaestin like 1; IURN: interleukin 1 receptor antagonist; KDR: kinase insert domain receptor; MAG: myelin associated glycoprotein; MERTK: MER proto-oncogene, tyrosine kinase; MY07A: myosin VIIA; MYOC: myocilin; NOTCH4: notch 4; NR3C1: nuclear receptor subfamily 3 group C member 1; NXNL1: nucleoredoxin like 1; OPA1: OPA1, mitochondrial dynamin like GTPase; OPA3: OPA3, outer mitochondrial membrane lipid metabolism regulator; OPTN: optineurin; PDGFA: platelet derived growth factor subunit A; PDGFB: platelet derived growth factor subunit B; PDGFC: platelet derived growth factor C; PDGFD: platelet derived growth factor D; PDGFRA: platelet derived growth factor receptor alpha; PDGFRB: platelet derived growth factor receptor beta; PGF: placental growth factor; PLXND1: plexin D1; PPP3CA: protein phosphatase 3 catalytic subunit alpha; PPP3CB: protein phosphatase 3 catalytic subunit beta; PPP3CC: protein phosphatase 3 catalytic subunit gamma; PPP3R1: protein phosphatase 3 regulatory subunit B, alpha; PPP3R2: protein phosphatase 3 regulatory subunit B, beta; PRPH2: peripherin 2; PTGDR: prostaglandin D2 receptor; PTGDR2: prostaglandin D2 receptor 2; PTGER1: prostaglandin E receptor 1; PTGER2: prostaglandin E receptor 2; PTGER3: prostaglandin E receptor 3; PTGER4: prostaglandin E receptor 4; PTGFR: prostaglandin F receptor; PTGIR: prostaglandin 12 receptor; RHO: rhodopsin; RLBP1: retinaldehyde binding protein 1; ROCK1: Rho associated coiled-coil containing protein kinase 1; ROCK2: Rho associated coiled-coil containing protein kinase 2; RPE65: RPE65, retinoid isomerohydrolase; RPGR: retinitis pigmentosa GTPase regulator; RS1: retinoschisin 1; SEMA3E: semaphorin 3E; SEMA3: semaphorin 3; SERPINF1: serpin family F member 1; SIRT1: sirtuin 1; SIRT2: sirtuin 2; SIRT3: sirtuin 3; SIRT4: sirtuin 4; SIRT5: sirtuin 5; SIRT6: sirtuin 6; SIRT7: sirtuin 7; SOD1: superoxide dismutase 1; TBXA2R: thromboxane A2 receptor; TEK: TEK receptor tyrosine kinase; TIE1: tyrosine kinase with immunoglobulin like and EGF like domains 1; TNF: tumor necrosis factor; TNFRSF10C: TNF receptor superfamily member 10c; UNC5B: unc-5 netrin receptor B; USH2A: usherin; VEGFA: vascular endothelial growth factor A; VEGFA-isoVEGF165: vascular endothelial growth factor A; VEGFA-isoVEGF165B: vascular endothelial growth factor A; VEGFB: vascular endothelial growth factor B; VEGFC: vascular endothelial growth factor C; VEGFD: vascular endothelial growth factor D; WFS1: wolframin ER transmembrane glycoprotein; aflibercept: aflibercept; etanercept: etanercept; bevacizumab-LC: bevacizumab; bevacizumab-HC: bevacizumab; bevacizumab-RKR: bevacizumab; ranibizumab-LC: ranibizumab; ranibizumab-HC: ranibizumab; ranibizumab-RKR: ranibizumab; anti-CCL11-LC: anti-CCL11; anti-CCL11-HC: anti-CCL11; anti-PDGFB-LC: anti-PDGFB; anti-PDGFB-HC: anti-PDGFB; anti-PDGFA-LC: anti-PDGFB1/anti-PDGFE1; anti-PDGFA-HC: anti-PDGFB1/anti-PDGFE1; bersanlimab-LC: bersanlimab; bersanlimab-HC: bersanlimab; clazakizumab-LC: clazakizumab; clazakizumab-HC: clazakizumab; olokizumab-LC: olokizumab;

[0072] Preferred therapeutic peptide or proteins that may be encoded by the cds of the at least one coding RNA are provided in Table 1. Additional information regarding each of these suitable amino acid sequences may also be derived from the sequence listing, e.g. the corresponding nucleic acid transcript IDs (“Ensembl Transcript ID”) is provided therein under identifier <223> for each sequence.

[0073] In preferred embodiments, the ophthalmic disease, disorder or condition may be any deficiency associated with any one of the proteins provided in List 1. Accordingly, in embodiments, the ophthalmic disease, disorder or condition may be an ABCA4 deficiency, an ADRB1 deficiency, an ANGPT1 deficiency, an ANGPT2 deficiency, a BEST1 deficiency, a CCR3 deficiency, a CD276 deficiency, a CD59 deficiency, a CFD deficiency, a CHM deficiency, a CHST4 deficiency, a CNR1 deficiency, a CNTF deficiency, a CRYAA deficiency, a CRYAB deficiency, a CSF3R deficiency, a DCN deficiency, a DICER1 deficiency, a DRD2 deficiency, an EGFR deficiency, an EGLN1 deficiency, an ENG deficiency, a FLT1 deficiency, a GUCY1A1 deficiency, a GUCY1A2 deficiency, a GUCY1B1 deficiency, a GUCY1B2 deficiency, a GUCY2D deficiency, a GUCY2F deficiency, a HEY1 deficiency, a HEPH deficiency, a HEPHL1 deficiency, an URN deficiency, a KDR deficiency, a MAG deficiency, a MERTK deficiency, a MY07A deficiency, a MYOC deficiency, a NOTCH4 deficiency, a NR3C1 deficiency, a NXNL1 deficiency, an OPA1 deficiency, an OPA3 deficiency, an OPTN deficiency, a PDGFA deficiency, a PDGFB deficiency, a PDGFC deficiency, a PDGFD deficiency, a PDGFRA deficiency, a PDGFRB deficiency, a PGF deficiency, a PLXND1 deficiency, a PPP3CA deficiency, a PPP3CB deficiency, a PPP3CC deficiency, a PPP3R1 deficiency, a PPP3R2 deficiency, a PRPH2 deficiency, a PTGDR deficiency, a PTGDR2 deficiency, a PTGER1 deficiency, a PTGER2 deficiency, a PTGER3 deficiency, a PTGER4 deficiency, a PTGFR deficiency, a PTGIR deficiency, a RHO deficiency, a RLBP1 deficiency, a ROCK1 deficiency, a ROCK2 deficiency, a RPE65 deficiency, a RPGR deficiency, a RS1 deficiency, a SEMA3E deficiency, a SEMA3A deficiency, SERPINF1 deficiency, a SIRT1 deficiency, a SIRT2 deficiency, a SIRT3 deficiency, a SIRT4 deficiency, a SIRT5 deficiency, a SIRT6 deficiency, a SIRT7 deficiency, a SOD1 deficiency, a TBXA2R deficiency, a TEK deficiency, a TIE1 deficiency, a TNF deficiency, a TNFRSF10C deficiency, an UNC5B deficiency, an USH2A deficiency, a VEGFA deficiency, a VEGFA-isoVEGF165 deficiency, a VEGFA-isoVEGF165B deficiency, a VEGFB deficiency, a VEGFC deficiency, a VEGFD deficiency, a WFS1 deficiency, a CCL11 deficiency, a DPP4 deficiency, an IL6R deficiency, a TNFRSF10A deficiency, a TNFRSF10B deficiency, a TNFRSF1A deficiency, or a TNFRSF1B deficiency.

[0074] In Table 1 below, each row corresponds to suitable therapeutic proteins that may be encoded by the coding RNA of the composition for use (row 1 to 125). Column A provides Gene/Protein Symbols (derived from Ensembl Gene ID) of the suitable therapeutic proteins. The “Gene/Protein Symbol” used to describe suitable therapeutic proteins of the invention are also used throughout the description of the invention (as described above) as well as in the ST25 sequence listing under identifier <223>. Column B provides a further description of the respective therapeutic protein. Column C indicates the corresponding Ensembl Gene ID [ENSG00000 . . . ]. Column D provides protein SEQ ID NOs of the respective amino acid sequences of the indicated therapeutic proteins.

[0075] As an example, row 1 of Table 1 provides “ABCA4” (row 1, Column A), an “ATP binding cassette subfamily A member 4” (row 1, Column B), that can be identified by the corresponding Ensembl Gene ID “ENSG00000” 198691.1 (row 1, Column C), having the amino acid sequences according to SEQ ID NOs: 2 or 3 (row 1, Column D).

TABLE 1
Suitable therapeutic proteins and sequences
provided by the coding RNA of the composition for use

| | A | B | C | D |
|---|---|---|---|---|
| 1 | ABCA4 | ATP binding cassette | 198691.1 | 2, 3 |
| | | subfamily A member 4 | | |
| 2 | ADRB1 | adrenoceptor beta 1 | 043591.5 | 4 |
| 3 | ANGPT1 | angiopoietin 1 | 154188.9 | 5-8 |
| 4 | ANGPT2 | angiopoietin 2 | 091879.13 | 9-12 |
| 5 | BEST1 | bestrophin 1 | 167995.15 | 13-17 |
| 6 | CCR3 | C-C motif chemokine | 183625.14 | 18, 19 |
| | | receptor 3 | | |
| 7 | CD276 | CD276 molecule | 103855.17 | 20-26 |
| 8 | CD59 | CD59 molecule | 085063.15 | 27, 28 |
| | | (CD59 blood group) | | |
| 9 | CFD | complement factor D | 197766.7 | 29, 30 |
| 10 | CHM | CHM, Rab escort | 188419.13 | 31, 32 |
| | | protein 1 | | |
| 11 | CHST4 | carbohydrate | 140835.9 | 33 |
| | | sulfotransferase 4 | | |
| 12 | CNR1 | cannabinoid receptor 1 | 118432.12 | 34-36 |
| 13 | CNTF | ciliary neurotrophic | 242689.2 | 37 |
| | | factor | | |
| 14 | CRYAA | crystallin alpha A | 160202.7 | 38-40 |
| 15 | CRYAB | crystallin alpha B | 109846.7 | 41-43 |
| 16 | CSF3R | colony stimulating | 119535.17 | 44-46 |
| | | factor 3 receptor | | |
| 17 | DCN | decorin | 011465.16 | 47-54 |
| 18 | DICER1 | dicer 1, ribonuclease | 100697.14 | 55-57 |
| | | III | | |
| 19 | DRD2 | dopamine receptor D2 | 149295.13 | 58-61 |
| 20 | EGFR | epidermal growth | 146648.17 | 62-67 |
| | | factor receptor | | |
| 21 | EGLN1 | egl-9 family hypoxia | 135766.8 | 68 |
| | | inducible factor 1 | | |
| 22 | ENG | endoglin | 106991.13 | 69-71 |
| 23 | FLT1 | fms related tyrosine | 102755.11 | 72-80 |
| | | kinase 1 | | |
| 24 | FLT1(1-758) | fms related tyrosine | 102755.11 | 73 |
| | | kinase 1 (secreted) | | |
| 25 | FLT1-iso3 | fms related tyrosine | 102755.11 | 74 |
| | (sFlt1-14) | kinase 1 isoform 3 | | |
| 26 | FLT1-iso2 | fms related tyrosine | 102755.11 | 75 |
| | (sFlt1) | kinase 1 isoform 2 | | |
| 27 | FLT1-iso4 | fms related tyrosine | 102755.11 | 77 |
| | | kinase 1 isoform 4 | | |
| 28 | GUCY1A1 | guanylate cyclase 1 | 164116.16 | 81-86 |
| | | soluble subunit | | |
| | | alpha 1 | | |
| 29 | GUCY1A2 | guanylate cyclase 1 | 152402.10 | 87-89 |
| | | soluble subunit | | |
| | | alpha 2 | | |
| 30 | GUCY1B1 | guanylate cyclase 1 | 061918.12 | 90-95 |
| | | soluble subunit beta 1 | | |
| 31 | GUCY1B2 | guanylate cyclase 1 | 123201 | 96 |
| | | soluble subunit beta 2 | | |
| | | (pseudogene) | | |
| 32 | GUCY2D | guanylate cyclase 2D, | 132518.6 | 97 |
| | | retinal | | |
| 33 | GUCY2F | guanylate cyclase 2F, | 101890.4 | 98 |
| | | retinal | | |
| 34 | HEY1 | hes related family | 164683.16 | 99-101 |
| | | bHLH transcription | | |
| | | factor with | | |
| | | YRPW motif 1 | | |
| 35 | HEPH | hephaestin | 089472.16 | 102-107 |
| 36 | HEPHL1 | hephaestin like 1 | 181333.11 | 108 |
| 37 | IL1RN | interleukin 1 receptor | 136689.18 | 109-112 |
| | | antagonist | | |
| 38 | KDR | kinase insert domain | 128052.9 | 113 |
| | | receptor | | |
| 39 | MAG | myelin associated | 105695.14 | 114-117 |
| | | glycoprotein | | |
| 40 | MERTK | MER proto-oncogene, | 153208.16 | 118-121 |
| | | tyrosine kinase | | |
| 41 | MYO7A | myosin VIIA | 137474.20 | 122-126 |
| 42 | MYOC | myocilin | 034971.16 | 127, 128 |
| 43 | NOTCH4 | notch 4 | 235396.5 | 129-133 |
| 44 | NR3C1 | nuclear receptor | 113580.14 | 134-137 |
| | | subfamily 3 group C | | |
| | | member 1 | | |
| 45 | NXNL1 | nucleoredoxin like 1 | 171773.2 | 138 |
| 46 | OPA1 | OPA1, mitochondrial | 198836.9 | 139-155 |
| | | dynamin like GTPase | | |
| 47 | OPA3 | OPA3, outer | 125741.4 | 156-158 |
| | | mitochondrial | | |
| | | membrane lipid | | |
| | | metabolism regulator | | |
| 48 | OPTN | optineurin | 123240.16 | 159-162 |
| 49 | PDGFA | platelet derived | 197461.13 | 163, 164 |
| | | growth factor subunit | | |
| | | A | | |
| 50 | PDGFB | platelet derived | 100311.16 | 165, 166 |
| | | growth factor subunit | | |
| | | B | | |
| 51 | PDGFC | platelet derived | 145431.10 | 167-169 |
| | | growth factor C | | |
| 52 | PDGFD | platelet derived | 170962.12 | 170, 171 |
| | | growth factor D | | |
| 53 | PDGFRA | platelet derived | 134853.11 | 172-174 |
| | | growth factor receptor | | |
| | | alpha | | |
| 54 | PDGFRB | platelet derived | 113721.13 | 175, 176 |
| | | growth factor receptor | | |
| | | beta | | |
| 55 | PGF | placental growth | 119630.13 | 177-180 |
| | | factor | | |
| 56 | PLXND1 | plexin D1 | 004399.12 | 181-183 |
| 57 | PPP3CA | protein phosphatase 3 | 138814.16 | 184-188 |
| | | catalytic subunit alpha | | |
| 58 | PPP3CB | protein phosphatase 3 | 107758.15 | 189-192 |
| | | catalytic subunit beta | | |
| 59 | PPP3CC | protein phosphatase 3 | 120910.14 | 193-196 |
| | | catalytic subunit | | |
| | | gamma | | |
| 60 | PPP3R1 | protein phosphatase 3 | 221823.10 | 197-199 |
| | | regulatory subunit B | | |
| | | alpha | | |
| 61 | PPP3R2 | protein phosphatase 3 | 188386.6 | 200, 201 |
| | | regulatory subunit B | | |
| | | beta | | |
| 62 | PRPH2 | peripherin 2 | 112619.7 | 202 |
| 63 | PTGDR | prostaglandin D2 | 168229.3 | 203, 204 |
| | | receptor | | |
| 64 | PTGDR2 | prostaglandin D2 | 183134.4 | 205 |
| | | receptor 2 | | |
| 65 | PTGER1 | prostaglandin E | 160951.3 | 206 |
| | | receptor 1 | | |
| 66 | PTGER2 | prostaglandin E | 125384.6 | 207, 208 |
| | | receptor 2 | | |
| 67 | PTGER3 | prostaglandin E | 050628.20 | 209-218 |
| | | receptor 3 | | |
| 68 | PTGER4 | prostaglandin E | 171522.5 | 219 |
| | | receptor 4 | | |
| 69 | PTGFR | prostaglandin F | 122420.9 | 220-222 |
| | | receptor | | |
| 70 | PTGIR | prostaglandin I2 | 160013.8 | 223-227 |
| | | receptor | | |
| 71 | RHO | rhodopsin | 163914.4 | 228 |
| 72 | RLBP1 | retinaldehyde binding | 140522.11 | 229, 230 |
| | | protein 1 | | |
| 73 | ROCK1 | Rho associated coiled- | 067900.7 | 231, 232 |
| | | coil containing | | |
| | | protein kinase 1 | | |
| 74 | ROCK2 | Rho associated coiled- | 134318.13 | 233-236 |
| | | coil containing | | |
| | | protein kinase 2 | | |
| 75 | RPE65 | RPE65, retinoid | 116745.6 | 237 |
| | | isomerohydrolase | | |
| 76 | RPGR | retinitis pigmentosa | 156313.13 | 238-249 |
| | | GTPase regulator | | |
| 77 | RS1 | retinoschisin 1 | 102104.8 | 250 |
| 78 | SEMA3E | semaphorin 3E | 170381.13 | 251-254 |
| 79 | SERPINF1 | serpin family F | 132386.10 | 255, 256 |
| | | member 1 | | |
| 80 | SIRT1 | sirtuin 1 | 096717.11 | 257-259 |
| 81 | SIRT2 | sirtuin 2 | 068903.19 | 260-267 |
| 82 | SIRT3 | sirtuin 3 | 142082.14 | 268-275 |
| 83 | SIRT4 | sirtuin 4 | 089163.4 | 276 |
| 84 | SIRT5 | sirtuin 5 | 124523.15 | 277-282 |
| 85 | SIRT6 | sirtuin 6 | 077463.14 | 283-287 |
| 86 | SIRT7 | sirtuin 7 | 187531.13 | 288, 289 |
| 87 | SOD1 | superoxide dismutase | 142168.14 | 290, 291 |
| | | 1 | | |
| 88 | TBXA2R | thromboxane A2 | 006638.11 | 292-294 |
| | | receptor | | |
| 89 | TEK | TEK receptor tyrosine | 120156.20 | 295-298 |
| | | kinase | | |
| 90 | TIE1 | tyrosine kinase with | 066056.13 | 299, 300 |
| | | immunoglobulin | | |
| | | like and EGF | | |
| | | like domains 1 | | |
| 91 | TNF | tumor necrosis factor | 232810.3 | 301 |
| 92 | TNFRSF10C | TNF receptor | 173535.14 | 302, 303 |
| | | superfamily member | | |
| | | 10c | | |
| 93 | UNC5B | unc-5 netrin receptor | 107731.12 | 304, 305 |
| | | B | | |
| 94 | USH2A | usherin | 042781.12 | 306, 307 |
| 95 | VEGFA | vascular endothelial | 112715.21 | 308-324 |
| | | growth factor A | | |
| 96 | VEGFA- | vascular endothelial | 112715.21 | 319 |
| | isoVEGF165 | growth factor A | | |
| 97 | VEGFA- | vascular endothelial | 112715.21 | 320 |
| | isoVEGF165B | growth factor A | | |
| 98 | VEGFB | vascular endothelial | 173511.9 | 325, 326 |
| | | growth factor B | | |
| 99 | VEGFC | vascular endothelial | 150630.3 | 327 |
| | | growth factor C | | |
| 100 | VEGFD | vascular endothelial | 165197.4 | 328 |
| | | growth factor D | | |
| 101 | WFS1 | wolframin ER | 109501.13 | 329 |
| | | transmembrane | | |
| | | glycoprotein | | |
| 102 | aflibercept | aflibercept | | 330 |
| 103 | etanercept | etanercept | | 331 |
| 104 | bevacizumab | bevacizumab | | 332-334 |
| 105 | ranibizumab | ranibizumab | | 335-337 |
| 106 | anti-CCL11 | anti-CCL11 | | 338, 339 |
| 107 | anti-PDGFB | anti-PDGFB | | 340, 341 |
| 108 | anti-PDGFA | anti-PDGFB1/ | | 342, 343 |
| | | anti-PDGFE1 | | |
| 109 | bersanlimab | bersanlimab | | 344, 345 |
| 110 | clazakizumab | clazakizumab | | 346, 347 |
| 111 | olokizumab | olokizumab | | 348, 349 |
| 112 | sarilumab | sarilumab | | 350, 351 |
| 113 | siltuximab | siltuximab | | 352, 353 |
| 114 | sirukumab | sirukumab | | 354, 355 |
| 115 | DPP4-Fc | dipeptidyl peptidase | | 356 |
| | | 4 Fc Chimera | | |
| 116 | IL6R-Fc | interleukin 6 receptor | | 357 |
| | | Fc Chimera | | |
| 117 | PDGFRB-Fc | platelet derived growth factor | | 358 |
| | | receptor beta Fc Chimera | | |
| 118 | TNFRSF10A- | TNF receptor superfamily member | | 359 |
| | Fc | 10a Fc Chimera | | |
| 119 | TNFRSF10B- | TNF receptor superfamily member | | 360 |
| | Fc | 10b Fc Chimera | | |
| 120 | TNFRSF1A- | TNF receptor superfamily member | | 361 |
| | Fc | 1A Fc Chimera | | |
| 121 | TNFRSF1B- | TNF receptor superfamily member | | 362 |
| | Fc | 1B Fc Chimera | | |
| 122 | UNC5B-Fc | UNC5H2/UNC5B Fc | | 363 |
| | | Chimera | | |
| 123 | PDGFRB- | PDGFRB-trap (IgG4) | | 364 |
| | trap(IgG4) | | | |
| 124 | PDGFRB- | PDGFRB-trap (IgG1) | | 365 |
| | trap(IgG1) | | | |
| 125 | SEMA3A | Semaphorin 3A | 075213.10 | 436 |

[0076] Accordingly, in preferred embodiments, the peptide or protein is selected from ABCA4, ADRB1, ANGPT1, ANGPT2, BEST1, CCR3, CD276, CD59, CFD, CHM, CHST4, CNR1, CNTF, CRYAA, CRYAB, CSF3R, DCN, DICER1, DRD2, EGFR, EGLN1, ENG, FLT1, FLT1(1-758), FLT1-iso3(sFlt1-14), FLT1-iso2(sFlt1), FLT1-iso4, GUCY1A1, GUCY1A2, GUCY1B1, GUCY1B2, GUCY2D, GUCY2F, HEY1, HEPH, HEPHL1, URN, KDR, MAG, MERTK, MYO7A, MYOC, NOTCH4, NR3C1, NXNL1, OPA1, OPA3, OPTN, PDGFA, PDGFB, PDGFC, PDGFD, PDGFRA, PDGFRB, PGF, PLXND1, PPP3CA, PPP3CB, PPP3CC, PPP3R1, PPP3R2, PRPH2, PTGDR, PTGDR2, PTGER1, PTGER2, PTGER3, PTGER4, PTGFR, PTGIR, RHO, RLBP1, ROCK1, ROCK2, RPE65, RPGR, RS1, SEMA3E, SEMA3A, SERPINF1, SIRT1, SIRT2, SIRT3, SIRT4, SIRT5, SIRT6, SIRT7, SOD1, TBXA2R, TEK, TIE1, TNF, INFRSF10C, UNC5B, USH2A, VEGFA, VEGFA-isoVEGF165, VEGFA-isoVEGF165B, VEGFB, VEGFC, VEGFD, WFS1, aflibercept, etanercept, bevacizumab, ranibizumab, anti-CCL11, anti-PDGFB, anti-PDGFA, bersanlimab, clazakizumab, olokizumab, sarilumab, siltuximab, sirukumab, DPP4-Fc, IL6R-Fc, PDGFRB-Fc, TNFRSF10A-Fc, TNFRSF10B-Fc, TNFRSF1A-Fc, TNFRSF1B-Fc, UNC5B-Fc, PDGFRB-trap(IgG4), PDGFRB-trap(IgG1), Cas9, Cpf1, C2c1, C2c3, and C2c2, Cas13, CasX and CasY, or a fragment or variant of any of these.

[0077] Accordingly, in preferred embodiments, the at least one coding RNA of the composition for use comprises at least one cds, wherein the at least one cds encodes at least one therapeutic peptide or protein comprising or consisting of an amino acid sequences being identical or at least 70%, 80%, 85%, 86%, 87%, 88%, 89%, 90%, 91%, 92%, 93%, 94%, 95%, 96%, 97%, 98%, or 99% identical to any one of SEQ ID NOs: 2 to 365, 436 or a fragment or variant thereof of any of these sequences.

[0078] In other preferred embodiments, the at least one coding RNA of the composition for use comprises at least one cds, wherein the at least one cds encodes at least one CRISPR-associated endonuclease comprising or consisting of an amino acid sequences being identical or at least 70%, 80%, 85%, 86%, 87%, 88%, 89%, 90%, 91%, 92%, 93%, 94%, 95%, 96%, 97%, 98%, or 99% identical to any one of SEQ ID NOs: 428-1345, 10999-11001, of published PCT patent application WO2018/172556. Accordingly, SEQ ID NOs: 428-1345, 10999-11001 of WO2018/172556 are herewith incorporated by reference.

[0079] In embodiments, the at least one cds encodes at least one peptide or protein, wherein said at least one peptide or protein is a therapeutic peptide or protein.

[0080] In other embodiments, the at least one cds encodes at least one antigenic peptide or protein, wherein said antigenic peptide or protein may be derived from tumor antigen, a viral antigen, a bacterial antigen, a fungal antigen, or a parasite antigen.

[0081] The term “antigen” as used herein will be recognized and understood by the person of ordinary skill in the art, and is e.g. intended to refer to a substance which may be recognized by the immune system, preferably by the adaptive immune system, and is capable of triggering an antigen-specific immune response, e.g. by formation of antibodies and/or antigen-specific T cells as part of an adaptive immune response. Typically, an antigen may be or may comprise a peptide or protein which may be presented by the MHC to T-cells. Also fragments, variants and derivatives of peptides or proteins derived from e.g. cancer antigens comprising at least one epitope may be understood as antigens. In the context of the present invention, an antigen may be the product of translation of a provided RNA of the first aspect. The term “antigenic peptide or protein” will be recognized and understood by the person of ordinary skill in the art, and is e.g. intended to refer to a peptide or protein derived from a (antigenic) protein which may stimulate the body's adaptive immune system to provide an adaptive immune response. Therefore an “antigenic peptide or protein” comprises at least one epitope or antigen of the protein it is derived from (e.g. tumor specific antigen).

[0082] Suitably, tumor antigens may be derived from antigens causing eyelid tumors, conjunctival/corneal cancers, uveal cancers, retinal cancers, and orbital/adnexal cancers, in particular Squamous cell carcinoma, squamous neoplasia, Intraocular Melanoma or Retinoblastoma, Sebaceous Carcinoma of the eyelid, Uveal melanoma, iris melanoma, ciliary body melanoma, and choroidal melanoma, or tumor antigens causing a cancer with metastases in the eye (e.g. choroidal metastases, ocular metastases, orbital metastases).

[0083] According to other embodiments, the coding RNA of the composition for use encodes at least one peptide or protein as defined above and additionally at least one further heterologous peptide or protein element.

[0084] Suitably, the at least one further heterologous peptide or protein element may promote/improve secretion of the peptide or protein (e.g. via secretory signal peptides), promote/improve anchoring of the peptide or protein in the plasma membrane (e.g. via transmembrane elements), promote/improve formation of complexes (e.g. via multimerization domains), promote/improve virus-like particle formation (VLP forming sequence), a nuclear localization signal (NLS). In addition, the RNA according may encode peptide linker elements, self-cleaving peptides, immunologic adjuvant sequences or dendritic cell targeting sequences. Suitable multimerization domains may be selected from the list of amino acid sequences according to SEQ ID NOs: 1116-1167 of WO2017/081082, or fragments or variants of these sequences. Suitable transmembrane elements may be selected from the list of amino acid sequences according to SEQ ID NOs: 1228-1343 of WO2017/081082, or fragments or variants of these sequences. Suitable VLP forming sequences may be selected from the list of amino acid sequences according to SEQ ID NOs: 1168-1227 of WO2017/081082, or fragments or variants of these sequences. Suitable peptide linkers may be selected from the list of amino acid sequences according to SEQ ID NOs: 1509-1565 of WO2017/081082, or fragments or variants of these sequences. Suitable self-cleaving peptides may be selected from the list of amino acid sequences according to SEQ ID NOs: 1434-1508 of WO2017/081082, or fragments or variants of these sequences. Suitable immunologic adjuvant sequences may be selected from the list of amino acid sequences according to SEQ ID NOs: 1360-1421 of WO2017/081082, or fragments or variants of these sequences. Suitable dendritic cell targeting sequences may be selected from the list of amino acid sequences according to SEQ ID NOs: 1344-1359 of WO2017/081082, or fragments or variants of these sequences. Suitable secretory signal peptides may be selected from the list of amino acid sequences according to SEQ ID NOs: 1-1115 and SEQ ID NO: 1728 of WO2017/081082, or fragments or variants of these sequences. Suitable nuclear localization signal (NLS) sequences may be selected from the list of amino acid sequences according to SEQ ID NOs: 426, 427, 10575, 381, 382, 384, 11957, 11958-11964 of published PCT patent application WO2018/172556 or fragments or variants of these sequences.

[0085] According to preferred embodiments, the coding RNA of the composition for use comprises at least one cds encoding at least one peptide or protein as specified herein, or fragments and variants thereof. In that context, any cds encoding at least one peptide or protein as defined herein or fragments and variants thereof may be understood as suitable cds and may therefore be comprised in the coding RNA.

[0086] In embodiments, the length the cds may be at least or greater than about 30, 40, 50, 60, 70, 80, 90, 100, 150, 200, 250, 300, 350, 400, 450, 500, 600, 700, 800, 900, 1000, 1100, 1200, 1300, 1400, 1500, 1600, 1700, 1800, 1900, 2000, 2500, 3000, 3500, 4000, 5000, or 6000 nucleotides. In embodiments, the length of the cds may be in a range of from about 300 to about 2000 nucleotides.

[0087] The terms “coding sequence” or “coding region” and “cds” as used herein will be recognized and understood by the person of ordinary skill in the art, and are e.g. intended to refer to a sequence of several nucleotides which may be translated into a peptide or protein. In the context of the present invention a cds is preferably an RNA sequence, consisting of a number of nucleotide triplets, starting with a start codon and preferably terminating with one stop codon. In embodiments, the cds of the RNA may terminate with or two or more stop codons. The first stop codon of the two or more stop codons may be TGA or UGA and the second stop codon of the two or more stop codons may be selected from TAA, TGA, TAG, UAA, UGA or UAG.

[0088] In preferred embodiments, the coding RNA of the composition for use may comprise or consist of at least one cds encoding any one of SEQ ID NOs: 2-365, 436 or SEQ ID NOs: 428-441, 10999-11001, 442-1345 of WO2018/172556 or fragments of variants thereof.

[0089] It has to be understood that, on nucleic acid level, any RNA sequence which encodes an amino acid sequences being identical to SEQ ID NOs: 2-365, 436 or SEQ ID NOs: 428-441, 10999-11001, 442-1345 of WO2018/172556 or fragments or variants thereof, or any RNA sequence which encodes amino acid sequences being at least 70%, 80%, 85%, 86%, 87%, 88%, 89%, 90%, 91%, 92%, 93%, 94%, 95%, 96%, 97%, 98%, or 99% identical to any one of SEQ ID NOs: 2-365, 436 or SEQ ID NOs: 428-441, 10999-11001, 442-1345 of WO2018/172556 or fragments or variants thereof, may be selected and may accordingly be understood as suitable cds, and may therefore be comprised in the coding RNA of the composition for use.

[0090] In preferred embodiments, the coding RNA of the composition for use is an artificial RNA.

[0091] The term “artificial RNA” as used herein is intended to refer to an RNA that does not occur naturally. In other words, an artificial RNA may be understood as a non-natural RNA molecule. Such RNA molecules may be non-natural due to its individual sequence (e.g. G/C content modified coding sequence, UTRs) and/or due to other modifications, e.g. structural modifications of modified nucleotides. Artificial RNA may be designed and/or generated by genetic engineering to correspond to a desired artificial sequence of nucleotides. In this context an artificial RNA is a sequence that may not occur naturally, i.e. it differs from the wild type sequence by at least one nucleotide. The term “artificial RNA” is not restricted to mean “one single molecule” but is understood to comprise an ensemble of essentially identical molecules. Accordingly, it may relate to a plurality of essentially identical RNA molecules.

[0092] In preferred embodiments, the coding RNA of the composition for use is a modified and/or stabilized RNA.

[0093] According to preferred embodiments, the coding RNA of the composition for use may thus be provided as a “stabilized artificial RNA” or “stabilized coding RNA” that is to say an RNA showing improved resistance to in vivo degradation and/or an RNA showing improved stability in vivo (suitably after SCS administration), and/or an RNA showing improved translatability in vivo (suitably after SCS administration). In the following, modifications are described which are suitably to “stabilize” the coding RNA of the composition.

[0094] In embodiments, stabilization may be effected by providing a “dried RNA” and/or a “purified RNA” as specified herein.

[0095] A purified coding RNA may be a HPLC purified coding RNA, and/or a pharmaceutical grade coding RNA.

[0096] Alternatively or in addition to that, stabilization can be effected, e.g., by a modified phosphate backbone of the coding RNA of the composition for use. A backbone modification may be a modification in which phosphates of the backbone of the nucleotides contained in RNA are chemically modified. Nucleotides that may be preferably used comprise e.g. a phosphorothioate-modified phosphate backbone, preferably at least one of the phosphate oxygens contained in the phosphate backbone being replaced by a sulfur atom. Stabilized RNAs may further include, e.g.: non-ionic phosphate analogues, such as, e.g., alkyl and aryl phosphonates, in which the charged phosphonate oxygen is replaced by an alkyl or aryl group, or phosphodiesters and alkylphosphotriesters, in which the charged oxygen residue is present in alkylated form. Such backbone modifications typically include modifications from the group consisting of methylphosphonates, phosphoramidates and phosphorothioates (e.g. cytidine-5′-O-(1-thiophosphate)).

[0097] In the following, suitable modifications are described that are capable of “stabilizing” the coding RNA of the composition for use.

[0098] According to embodiments, the coding RNA of the composition for use is a modified coding RNA, wherein the modification refers to chemical modifications comprising backbone modifications as well as sugar modifications or base modifications.

[0099] A modified coding RNA may comprise nucleotide analogues/modifications, e.g. backbone modifications, sugar modifications or base modifications. A backbone modification in the context of the invention is a modification, in which phosphates of the backbone of the nucleotides are chemically modified. A sugar modification in the context of the invention is a chemical modification of the sugar of the nucleotides of the RNA.

[0100] Furthermore, a base modification in the context of the invention is a chemical modification of the base moiety of the nucleotides of the RNA. In this context, nucleotide analogues or modifications are preferably selected from nucleotide analogues which are applicable for transcription and/or translation.

[0101] In particularly preferred embodiments, the nucleotide analogues/modifications which may be incorporated into a modified RNA as described herein are preferably selected from 2-amino-6-chloropurineriboside-5′-triphosphate, 2-Aminopurine-riboside-5-triphosphate; 2-aminoadenosine-5′-triphosphate, 2′-Amino-2′-deoxycytidine-triphosphate, 2-thiocytidine-5′-triphosphate, 2-thiouridine-5′-triphosphate, 2′-Fluorothymidine-5′-triphosphate, 2′-O-Methyl-inosine-5′-triphosphate 4-thiouridine-5′-triphosphate, 5-aminoallylcytidine-5′-triphosphate, 5-aminoallyluridine-5′-triphosphate, 5-bromocytidine-5′-triphosphate, 5-bromouridine-5-triphosphate, 5-Bromo-2′-deoxycytidine-5′-triphosphate, 5-Bromo-2′-deoxyuridine-5′-triphosphate, 5-iodocytidine-5′-triphosphate, 5-Iodo-2′-deoxycytidine-5′-triphosphate, 5-iodouridine-5′-triphosphate, 5-iodo-2′-deoxyuridine-5′-triphosphate, 5-methylcytidine-5′-triphosphate, 5-methyluridine-5′-triphosphate, 5-Propynyl-2′-deoxycytidine-5′-triphosphate, 5-Propynyl-2′-deoxyuridine-5′-triphosphate, 6-azacytidine-5′-triphosphate, 6-azauridine-5′-triphosphate, 6-chloropurineriboside-5′-triphosphate, 7-deazaadenosine-5′-triphosphate, 7-deazaguanosine-5′-triphosphate, 8-azaadenosine-5′-triphosphate, 8-azidoadenosine-5′-triphosphate, benzimidazole-riboside-5′-triphosphate, N1-methyladenosine-5′-triphosphate, N1-methylguanosine-5′-triphosphate, N6-methyladenosine-5′-triphosphate, 06-methylguanosine-5′-triphosphate, pseudouridine-5′-triphosphate, or puromycin-5′-triphosphate, xanthosine-5′-triphosphate. Particular preference is given to nucleotides for base modifications selected from the group of base-modified nucleotides consisting of 5-methylcytidine-5′-triphosphate, 7-deazaguanosine-5′-triphosphate, 5-bromocytidine-5′-triphosphate, and pseudouridine-5′-triphosphate, pyridin-4-one ribonucleoside, 5-aza-uridine, 2-thio-5-aza-uridine, 2-thiouridine, 4-thio-pseudouridine, 2-thio-pseudouridine, 5-hydroxyuridine, 3-methyluridine, 5-carboxymethyl-uridine, 1-carboxymethyl-pseudouridine, 5-propynyl-uridine, 1-propynyl-pseudouridine, 5-taurinomethyluridine, 1-taurinomethyl-pseudouridine, 5-taurinomethyl-2-thio-uridine, 1-taurinomethyl-4-thio-uridine, 5-methyl-uridine, 1-methyl-pseudouridine, 4-thio-1-methyl-pseudouridine, 2-thio-1-methyl-pseudouridine, 1-methyl-1-deaza-pseudouridine, 2-thio-1-methyl-1-deaza-pseudouridine, dihydrouridine, dihydropseudouridine, 2-thio-dihydrouridine, 2-thio-dihydropseudouridine, 2-methoxyuridine, 2-methoxy-4-thio-uridine, 4-methoxy-pseudouridine, and 4-methoxy-2-thio-pseudouridine, 5-aza-cytidine, pseudoisocytidine, 3-methyl-cytidine, N4-acetylcytidine, 5-formylcytidine, N4-methylcytidine, 5-hydroxymethylcytidine, 1-methyl-pseudoisocytidine, pyrrolo-cytidine, pyrrolo-pseudoisocytidine, 2-thio-cytidine, 2-thio-5-methyl-cytidine, 4-thio-pseudoisocytidine, 4-thio-1-methyl-pseudoisocytidine, 4-thio-1-methyl-1-deaza-pseudoisocytidine, 1-methyl-1-deaza-pseudoisocytidine, zebularine, 5-aza-zebularine, 5-methyl-zebularine, 5-aza-2-thio-zebularine, 2-thio-zebularine, 2-methoxy-cytidine, 2-methoxy-5-methyl-cytidine, 4-methoxy-pseudoisocytidine, and 4-methoxy-1-methyl-pseudoisocytidine, 2-aminopurine, 2,6-diaminopurine, 7-deaza-adenine, 7-deaza-8-aza-adenine, 7-deaza-2-aminopurine, 7-deaza-8-aza-2-aminopurine, 7-deaza-2,6-diaminopurine, 7-deaza-8-aza-2,6-diaminopurine, 1-methyladenosine, N6-methyladenosine, N6-isopentenyladenosine, N6-(cis-hydroxyisopentenyl)adenosine, 2-methylthio-N6-(cis-hydroxyisopentenyl) adenosine, N6-glycinylcarbamoyladenosine, N6-threonylcarbamoyladenosine, 2-methylthio-N6-threonyl carbamoyladenosine, N6,N6-dimethyladenosine, 7-methyladenine, 2-methylthio-adenine, and 2-methoxy-adenine, inosine, 1-methyl-inosine, wyosine, wybutosine, 7-deaza-guanosine, 7-deaza-8-aza-guanosine, 6-thio-guanosine, 6-thio-7-deaza-guanosine, 6-thio-7-deaza-8-aza-guanosine, 7-methyl-guanosine, 6-thio-7-methyl-guanosine, 7-methylinosine, 6-methoxy-guanosine, 1-methylguanosine, N2-methylguanosine, N2,N2-dimethylguanosine, 8-oxo-guanosine, 7-methyl-8-oxo-guanosine, 1-methyl-6-thio-guanosine, N2-methyl-6-thio-guanosine, and N2,N2-dimethyl-6-thio-guanosine, 5′-O-(1-thiophosphate)-adenosine, 5′-O-(1-thiophosphate)-cytidine, 5′-O-(1-thiophosphate)-guanosine, 5′-O-(1-thiophosphate)-uridine, 5′-O-(1-thiophosphate)-pseudouridine, 6-aza-cytidine, 2-thio-cytidine, alpha-thio-cytidine, Pseudo-iso-cytidine, 5-aminoallyl-uridine, 5-iodo-uridine, N1-methyl-pseudouridine, 5,6-dihydrouridine, alpha-thio-uridine, 4-thio-uridine, 6-aza-uridine, 5-hydroxy-uridine, deoxy-thymidine, 5-methyl-uridine, Pyrrolo-cytidine, inosine, alpha-thio-guanosine, 6-methyl-guanosine, 5-methyl-cytdine, 8-oxo-guanosine, 7-deaza-guanosine, N1-methyl-adenosine, 2-amino-6-Chloro-purine, N6-methyl-2-amino-purine, Pseudo-iso-cytidine, 6-Chloro-purine, N6-methyl-adenosine, alpha-thio-adenosine, 8-azido-adenosine, 7-deaza-adenosine.

[0102] In some embodiments, at least one chemical modification is selected from pseudouridine, N1-methylpseudouridine, N1-ethylpseudouridine, 2-thiouridine, 4′-thiouridine, 5-methylcytosine, 5-methyluridine, 2-thio-1-methyl-1-deaza-pseudouridine, 2-thio-1-methyl-pseudouridine, 2-thio-5-aza-uridine, 2-thio-dihydropseudouridine, 2-thio-dihydrouridine, 2-thio-pseudouridine, 4-methoxy-2-thio-pseudouridine, 4-methoxy-pseudouridine, 4-thio-1-methyl-pseudouridine, 4-thio-pseudouridine, 5-aza-uridine, dihydropseudouridine, 5-methoxyuridine and 2′-O-methyl uridine.

[0103] In some embodiments, 100% of the uracil in the cds have a chemical modification, preferably a chemical modification is in the 5-position of the uracil.

[0104] Particularly preferred in the context of the invention are pseudouridine N1-methylpseudouridine (m1ψ), 5-methylcytosine, and 5-methoxyuridine. Accordingly, the coding RNA or the coding sequence may comprise at least one modified nucleotide selected from pseudouridine (J), N1-methylpseudouridine 5-methylcytosine, and 5-methoxyuridine.

[0105] In preferred embodiments, the at least one cds of the coding RNA is a codon modified cds, wherein the amino acid sequence encoded by the at least one codon modified cds is preferably not being modified compared to the amino acid sequence encoded by the corresponding wild type cds.

[0106] The term “codon modified coding sequence” relates to coding sequences that differ in at least one codon (triplets of nucleotides coding for one amino acid) compared to the corresponding wild type cds. Suitably, a codon modified cds in the context of the invention may show improved resistance to in vivo degradation and/or improved stability in vivo, and/or improved translatability in vivo. Codon modifications in the broadest sense make use of the degeneracy of the genetic code wherein multiple codons encoding the same amino acid may be used interchangeably (cf. Table 2) to optimize/modify the cds for in vivo applications as outlined above.

[0107] In particularly preferred embodiments, the at least one cds is a codon modified cds, wherein the codon modified cds is selected from C maximized cds, CAI maximized cds, human codon usage adapted cds, G/C content modified cds, and G/C optimized cds, or any combination thereof. Accordingly, the cds of the coding RNA encoding e.g. amino acid sequences according to SEQ ID NOs: 2-365, 436 may be a C maximized cds, a CAI maximized cds, a human codon usage adapted cds, a G/C content modified cds, and a G/C optimized cds, or any combination thereof.

[0108] In preferred embodiments, the coding RNA of the composition for use may be modified, wherein the C content of the at least one cds may be increased, preferably maximized, compared to the C content of the corresponding wild type cds (herein referred to as “C maximized coding sequence”). The amino acid sequence encoded by the C maximized cds of the RNA is preferably not modified as compared to the amino acid sequence encoded by the respective wild type nucleic acid cds. The generation of a C maximized nucleic acid sequences may be carried out using a method according to WO2015/062738, the disclosure of WO2015/062738 included herewith by reference. Accordingly, the coding RNA of the composition for use may comprise or consist of at least one cds encoding at least one peptide or protein having an amino acid sequences being at least 70%, 80%, 85%, 86%, 87%, 88%, 89%, 90%, 91%, 92%, 93%, 94%, 95%, 96%, 97%, 98%, or 99% identical to any one of SEQ ID NOs: 2-365, 436 wherein the cds is a C maximized coding sequence as explained above.

[0109] In embodiments, the coding RNA of the composition for use may be modified, wherein the G/C content of the at least one cds may be modified compared to the G/C content of the corresponding wild type cds (herein referred to as “G/C content modified coding sequence”). In this context, the terms “G/C optimization” or “G/C content modification” relate to an RNA that comprises a modified, preferably an increased number of guanosine and/or cytosine nucleotides as compared to the corresponding wild type RNA sequence. Such an increased number may be generated by substitution of codons containing adenosine or thymidine nucleotides by codons containing guanosine or cytosine nucleotides. Advantageously, RNA sequences having an increased G (guanosine)/C (cytosine) content are more stable than sequences having an increased A (adenosine)/U (uracil) content. The amino acid sequence encoded by the G/C content modified cds of the RNA is preferably not modified as compared to the amino acid sequence encoded by the respective wild type sequence. Preferably, the G/C content of the cds of the RNA sequence is increased by at least 10%, 20%, 30%, preferably by at least 40% compared to the G/C content of the cds of the corresponding wild type RNA sequence. Accordingly, the coding RNA of the composition for use may comprise or consist of at least one cds encoding at least one peptide or protein having an amino acid sequences being at least 70%, 80%, 85%, 86%, 87%, 88%, 89%, 90%, 91%, 92%, 93%, 94%, 95%, 96%, 97%, 98%, or 99% identical to any one of SEQ ID NOs: 2-365, 436 wherein the cds is a “G/C content modified coding sequence” as explained above.

[0110] In preferred embodiments, the coding RNA of the composition for use may be modified, wherein the G/C content of the at least one cds may be optimized compared to the G/C content of the corresponding wild type cds (herein referred to as “G/C content optimized coding sequence”). “Optimized” in that context refers to a cds wherein the G/C content is preferably increased to the essentially highest possible G/C content. The amino acid sequence encoded by the G/C content optimized cds of the RNA is preferably not modified as compared to the amino acid sequence encoded by the respective wild type cds. The generation of a G/C content optimized RNA sequence may be carried out using a G/C content optimization method according to WO2002/098443. In this context, the disclosure of WO2002/098443 is included in its full scope in the present invention. Accordingly, the coding RNA of the composition for use may comprise or consist of at least one cds encoding at least one peptide or protein having an amino acid sequences being at least 70%, 80%, 85%, 86%, 87%, 88%, 89%, 90%, 91%, 92%, 93%, 94%, 95%, 96%, 97%, 98%, or 99% identical to any one of SEQ ID NOs: 2-365, 436 wherein the cds is a “G/C content optimized coding sequence” as explained above.

[0111] In embodiments, the coding RNA of the composition for use may be modified, wherein the codons in the at least one cds may be adapted to human codon usage (herein referred to as “human codon usage adapted coding sequence”). Codons encoding the same amino acid occur at different frequencies in a subject, e.g. a human. Accordingly, the cds of the RNA is preferably modified such that the frequency of the codons encoding the same amino acid corresponds to the naturally occurring frequency of that codon according to the human codon usage e.g. as shown in Table 2. E.g., in the case of the amino acid Ala, the wild type cds is preferably adapted in a way that the codon “GCC” is used with a frequency of 0.40, the codon “GCT” is used with a frequency of 0.28, the codon “GCA” is used with a frequency of 0.22 and the codon “GCG” is used with a frequency of 0.10 etc. (see Table 2). Accordingly, such a procedure (as exemplified for Ala) is applied for each amino acid encoded by the cds of the RNA to obtain sequences adapted to human codon usage. Accordingly, the coding RNA of the composition may comprise or consist of at least one cds encoding at least one peptide or protein having an amino acid sequences being at least 70%, 80%, 85%, 86%, 87%, 88%, 89%, 90%, 91%, 92%, 93%, 94%, 95%, 96%, 97%, 98%, or 99% identical to any one of SEQ ID NOs: 2-365, 436 wherein the cds is a “human codon usage adapted coding sequence” as explained above.

TABLE 2
Human codon usage with respective codon
frequencies indicated for each amino acid

| Amino acid | codon | frequency | Amino acid | codon | frequency |
|---|---|---|---|---|---|
| Ala | GCG | 0.10 | Pro | CCG | 0.11 |
| Ala | GCA | 0.22 | Pro | CCA | 0.27 |
| Ala | GCT | 0.28 | Pro | CCT | 0.29 |
| Ala | GCC* | 0.40 | Pro | CCC* | 0.33 |
| Cys | TGT | 0.42 | Gln | CAG* | 0.73 |
| Cys | TGC* | 0.58 | Gln | CAA | 0.27 |
| Asp | GAT | 0.44 | Arg | AGG | 0.22 |
| Asp | GAC* | 0.56 | Arg | AGA* | 0.21 |
| Glu | GAG* | 0.59 | Arg | CGG | 0.19 |
| Glu | GAA | 0.41 | Arg | CGA | 0.10 |
| Phe | TTT | 0.43 | Arg | CGT | 0.09 |
| Phe | TTC* | 0.57 | Arg | CGC | 0.19 |
| Gly | GGG | 0.23 | Ser | AGT | 0.14 |
| Gly | GGA | 0.26 | Ser | AGC* | 0.25 |
| Gly | GGT | 0.18 | Ser | TCG | 0.06 |
| Gly | GGC* | 0.33 | Ser | TCA | 0.15 |
| His | CAT | 0.41 | Ser | TCT | 0.18 |
| His | CAC* | 0.59 | Ser | TCC | 0.23 |
| Ile | ATA | 0.14 | Thr | ACG | 0.12 |
| Ile | ATT | 0.35 | Thr | ACA | 0.27 |
| Ile | ATC* | 0.52 | Thr | ACT | 0.23 |
| Lys | AAG* | 0.60 | Thr | ACC* | 0.38 |
| Lys | AAA | 0.40 | Val | GTG* | 0.48 |
| Leu | TTG | 0.12 | Val | GTA | 0.10 |
| Leu | TTA | 0.06 | Val | GTT | 0.17 |
| Leu | CTG* | 0.43 | Val | GTC | 0.25 |
| Leu | CTA | 0.07 | Trp | TGG* | 1 |
| Leu | CTT | 0.12 | Tyr | TAT | 0.42 |
| Leu | CTC | 0.20 | Tyr | TAC* | 0.58 |
| Met | ATG* | 1 | Stop | TGA* | 0.61 |
| Asn | AAT | 0.44 | Stop | TAG | 0.17 |
| Asn | AAC* | 0.56 | Stop | TAA | 0.22 |

*most frequent human codon

[0112] In embodiments, the coding RNA of the composition for use may be modified, wherein the codon adaptation index (CAI) may be increased or preferably maximised in the at least one cds (herein referred to as “CAI maximized coding sequence”). Accordingly, it is preferred that all codons of the wild type nucleic acid sequence that are relatively rare in e.g. a human cell are exchanged for a respective codon that is frequent in the e.g. a human cell, wherein the frequent codon encodes the same amino acid as the relatively rare codon. Suitably, the most frequent codons are used for each encoded amino acid (see Table 2, most frequent human codons are marked with asterisks). Suitably, the RNA comprises at least one cds, wherein the codon adaptation index (CAI) of the at least one cds is at least 0.5, at least 0.8, at least 0.9 or at least 0.95. Most preferably, the codon adaptation index (CAI) of the at least one cds is 1. E.g., in the case of the amino acid Ala, the wild type cds is adapted in a way that the most frequent human codon “GCC” is always used for said amino acid. Accordingly, such a procedure (as exemplified for Ala) is applied for each amino acid encoded by the cds of the RNA to obtain a CAI maximized cds. Accordingly, the coding RNA of the composition may comprise or consist of at least one cds encoding at least one peptide or protein having an amino acid sequences being at least 70%, 80%, 85%, 86%, 87%, 88%, 89%, 90%, 91%, 92%, 93%, 94%, 95%, 96%, 97%, 98%, or 99% identical to any one of SEQ ID NOs: 2-365, 436 wherein the cds is a “CAI maximized coding sequence” as explained above.

[0113] In certain embodiments, the coding RNA of the composition for use comprises a cds encoding a CRISPR-associated endonuclease as defined herein. In embodiments, the coding RNA of the composition for use comprises at least one cds comprising or consisting of a nucleic acid sequence being at least 70%, 80%, 85%, 86%, 87%, 88%, 89%, 90%, 91%, 92%, 93%, 94%, 95%, 96%, 97%, 98%, or 99% identical to any one of SEQ ID NO: 411; 2540-2553; 11117-11119; 11355-11357; 2554-3457; 1380-1393; 3700-3713; 4860-4873; 6020-6033; 7180-7193; 8340-8353; 11237-11239; 11473-11475; 11591-11593; 11709-11711; 11827-11829; 11945-11947; 1394-2297; 3714-4617; 4874-5777; 6034-6937; 7194-8097; 8354-9257; 412; 3474-3887; 2314-2327; 4634-4647; 5794-5807; 6954-6967; 8114-8127; 413-425; 3490-3503; 3506-3519; 3522-3535; 3538-3551; 3554-3567; 3570-3583; 3586-3599; 3602-3615; 3618-3631; 3634-3647; 3650-3663; 3666-3679; 3682-3695; 9514-9527; 9626-9639; 9738-9751; 9850-9863; 9962-9975, 10074-10087; 10186-10199; 10298-10311; 2330-2343; 2346-2359; 2362-2375; 2378-2391; 2394-2407; 2410-2423; 2426-2439; 2442-2455; 2458-2471; 2474-2487; 2490-2503; 2506-2519; 2522-2535; 9498-9511; 9610-9623; 9722-9735; 9834-9847; 9946-9959; 10058-10071; 10170-10183-10282-10295; 4650-4663; 4666-4679; 4682-4695; 4698-4711; 4714-4727; 4730-4743; 4746-4759; 4762-4775; 4778-4791; 4794-4807; 4810-4823; 4826-4839; 4842-4855; 9530-9543; 9642-9655; 9754-9767; 9866-9879; 9978-9991; 10090-10103; 10202-10215; 10314-10327; 5810-5823; 5826-5839; 5842-5855; 5858-5871; 5874-5887; 5890-5903; 5906-5919; 5922-5935; 5938-5951; 5954-5967; 5970-5983, 5986-5999; 6002-6015; 9546-9559; 9658-9671; 9770-9783; 9882-9895; 9994-10007; 10106-10119; 10218-10231; 10330-10343; 6970-6983; 6986-6999; 7002-7015; 7018-7031; 7034-7047; 7050-7063; 7066-7079; 7082-7095; 7098-7111; 7114-7127; 7130-7143; 7146-7159; 7162-7175; 9562-9575; 9674-9687; 9786-9799; 9898-9911; 10010-10023; 10122-10135; 10234-10247; 10346-10359; 8130-8143; 8146-8159; 8162-8175; 8178-8191; 8194-8207; 8210-8223; 8226-8239; 8242-8255; 8258-8271; 8274-8287; 8290-8302; 8306-8319; 8322-8335; 9578-9591; 9690-9703; 9802-9815; 9914-9927; 10026-10039; 10138-10151; 10250-10263; 10362-10375; 9290-9303; 9306-9319; 9322-9335; 9338-9351; 9354-9367; 9370-9383; 9386-9399; 9402-9415; 9418-9431; 9434-9447; 9450-9463; 9466-9479; 9482-9495; 9594-9607; 9706-9719; 9818-9831; 9930-9943; 10042-10055; 10154-10167; 10266-10279; 10378-10391 of published PCT patent application WO 2018/172556, said sequences herewith incorporated by reference.

[0114] In other embodiments, the coding RNA of the composition for use comprises at least one cds comprising or consisting of a nucleic acid sequence being at least 70%, 80%, 85%, 86%, 87%, 88%, 89%, 90%, 91%, 92%, 93%, 94%, 95%, 96%, 97%, 98%, or 99% identical to any one of SEQ ID NOs: 10552; 3458-3459; 3460-3473; 2298-2299; 4618-4619; 5778-5779; 6938-6939; 8098-8099; 9258-9259; 2300-2313; 4620-4633; 5780-5793; 6940-6953; 8100-8113; 9260-9273; 3488-3489; 10396; 2328-2329; 10395; 4648-4649; 10397; 5808-5809; 10398; 6968-6969; 10399; 8128-8129; 10400; 9274-9287; 3504-3505; 3520-3521; 3536-3537; 3552-3553; 3568-3669; 3584-3585; 3600-3601; 3616-3617; 3632-3633; 3648-3649; 3664-3665; 3680-3681; 3696-3697; 9528-9529; 9640-9641; 9752-9753; 9864-9865; 9976-9977; 10088-10089; 10200-10201; 10312-10313; 10403; 10410; 10417; 10424; 10431; 10438; 10445; 10452; 10459; 10466; 10473; 10480; 10487; 10494; 10501; 10508; 10515; 10522; 10529; 10536; 10543; 2344-2345; 2360-2361; 2376-2377; 2392-2393; 2408-2409; 2424-2425; 2440-2441; 2456-2457; 2472-2473; 2489-2490; 2504-2505; 2520-2521; 2536-2537; 9512-9513; 9624-9625; 9736-9737; 9848-9849; 9960-9961; 10072-10073; 10184-10185; 10296-10297; 10402; 10409; 10416; 10423; 10430; 10437; 10444; 10451; 10458; 10465; 10472; 10479; 10486; 10493; 10500; 10507; 10514; 10521; 10528; 10535; 10542; 4664-4665; 4680-4681; 4696-4697; 4712-4713; 4728-4729; 4744-4745; 4760-4761; 4776-4777; 4792-4793; 4808-4809; 4824-4825; 4840-4841; 4856-4857; 9544-9545; 9656-9657; 9768-9769; 9880-9881; 9992-9993; 10104-10105; 10216-10217; 10328-10329; 10404; 10411; 10418; 10425; 10432; 10439; 10446; 10453; 10460; 10467; 10474; 10481; 10488; 10495; 10502; 10509; 10516; 10523; 10530; 10537; 10544; 5824-5825; 5840-5841; 5856-5857; 5872-5873; 5888-5889; 5904-5905; 5920-5921; 5936-5937; 5952-5953; 5968-5969; 5984-5985; 6000-6001; 6016-6017; 9560-9561; 9672-9673; 9784-9785; 9896-9897; 10008-10009; 10120-10121; 10232-10233; 10344-10345; 10405; 10412; 10419; 10426; 10433; 10440; 10447; 10454; 10461; 10468; 10475; 10482; 10489; 10496; 10503; 10510; 10517; 10524; 10531; 10538; 10545; 7033; 7048-7049; 7064-7065; 7080-7081; 7096-7097; 7112-7113; 7128-7129; 7144-7145; 7160-7161; 7176-7177; 9576-9577; 9688-9689; 9800-9801; 9912-9913; 10024-10025; 10136-10137; 10248-10249; 10360-10361; 10406; 10413; 10420; 10427; 10434; 10441; 10448; 10455; 10462; 10469; 10476; 10483; 10490; 10497; 10504; 10511; 10518; 10525; 10532; 10539; 10546; 8144-8145; 8160-8160; 8176-8177; 8192-8193; 8208-8209; 8224-8225; 8240-8241; 8256-8257; 8272-8273; 8288-8289; 8304-8305; 8320-8321; 8336-8337; 9592-9593; 9704-9705; 9816-9817; 9928-9929; 10040-10041; 10152-10153; 10264-10265; 10376-10377; 10407; 10414; 10421; 10428; 10435; 10442; 10449; 10456; 10463; 10470; 10477; 10484; 10491; 10498; 10505; 10512; 10519; 10526; 10533; 10540; 10547; 9288-9289; 10401; 10553; 10582-10583; 10579-10580; 10585-10586; 10588-10589; 10591-10592; 10594-10595; 10597-10598; 10554-10574; 10601; 10602; 10615; 10616; 10629; 10630; 10643; 10644; 10657; 10658; 10671; 10672; 10685; 10686; 10699; 10700; 10713; 10714; 10727; 10728; 10741; 10742; 10755; 10756; 10769; 10770; 10783; 10784; 10797; 10798; 10811; 10812; 10825; 10826; 10839; 10840; 10853; 10854; 10867; 10868; 10881; 10882; 10603; 10604; 10617; 10618; 10631; 10632; 10645; 10646; 10659; 10660; 10673; 10674; 10687; 10688; 10701; 10702; 10715; 10716; 10729; 10730; 10743; 10744; 10757; 10758; 10771; 10772; 10785; 10786; 10799; 10800; 10813; 10814; 10827; 10828; 10841; 10842; 10855; 10856; 10869; 10870; 10883; 10884; 10605; 10606; 10619; 10620; 10633; 10634; 10647; 10648; 10661; 10662; 10675; 10676; 10689; 10690; 10703; 10704; 10717; 10718; 10731; 10732; 10745; 10746; 10759; 10760; 10773; 10774; 10787; 10788; 10801; 10802; 10815; 10816; 10829; 10830; 10843; 10844; 10857; 10858; 10871; 10872; 10885; 10886; 10607; 10608; 10621; 10622; 10635; 10636; 10649; 10650; 10663; 10664; 10677; 10678; 10691; 10692; 10705; 10706; 10719; 10720; 10733; 10734; 10747; 10748; 10761; 10762; 10775; 10776; 10789; 10790; 10803; 10804; 10817; 10818; 10831; 10832; 10845; 10846; 10859; 10860; 10873; 10874; 10887; 10888; 10609; 10610; 10623; 10624; 10637; 10638; 10651; 10652; 10665; 10666; 10679; 10680; 10693; 10694; 10707; 10708; 10721; 10722; 10735; 10736; 10749; 10750; 10763; 10764; 10777; 10778; 10791; 10792; 10805; 10806; 10819; 10820; 10833; 10834; 10847; 10848; 10861; 10862; 10875; 10876; 10889; 10890; 10611; 10612; 10625; 10626; 10639; 10640; 10653; 10654; 10667; 10668; 10681; 10682; 10695; 10696; 10709; 10710; 10723; 10724; 10737; 10738; 10751; 10752; 10765; 10766; 10779; 10780; 10793; 10794; 10807; 10808; 10821; 10822; 10835; 10836; 10849; 10850; 10863; 10864; 10877; 10878; 10891; 10892; 9304-9305; 9320-9321; 9336-9337; 9352-9353; 9368-9369; 9384-9385; 9400-9401; 9416-9417; 9432-9433; 9448-9449; 9464-9465; 9480-9481; 9496-9497; 9608-9609; 9720-9721; 9832-9833; 9944-9945; 10056-10057; 10168-10169; 10280-10281; 10392-10393; 10408; 10415; 10422; 10429; 10436; 10443; 10450; 10457; 10464; 10471; 10478; 10485; 10492; 10499; 10506; 10513; 10520; 10527; 10534; 10541; 10548 of published PCT patent application WO 2018/172556, said sequences herewith incorporated by reference.

[0115] In embodiments, the coding RNA of the composition for use may be monocistronic, bicistronic, or multicistronic.

[0116] The term “monocistronic” will be recognized and understood by the person of ordinary skill in the art, and is e.g. intended to refer to an RNA that comprises only one coding sequences. The terms “bicistronic”, or “multicistronic” as used herein will be recognized and understood by the person of ordinary skill in the art, and are e.g. intended to refer to an RNA that may have two (bicistronic) or more (multicistronic) coding sequences.

[0117] In preferred embodiments, the coding RNA of the composition for use is monocistronic.

[0118] In embodiments, the coding RNA of the composition for use is monocistronic and the cds of said RNA encodes at least two different proteins as defined above (e.g. derived from List 1 or Table 1). Accordingly, said cds may e.g. encode at least two, three, four, five, six, seven, eight and more therapeutic proteins, linked with or without an amino acid linker sequence, wherein said linker sequence can comprise rigid linkers, flexible linkers, cleavable linkers, or a combination thereof. Such constructs are herein referred to as “multi-protein-constructs”.

[0119] In embodiments, the coding RNA of the composition for use may be bicistronic or multicistronic and comprises at least two coding sequences, wherein the at least two coding sequences encode two or more proteins as defined above (e.g. derived from List 1 or Table 1). Accordingly, the coding sequences in a bicistronic or multicistronic RNA suitably encode distinct proteins or peptides as defined herein. Preferably, the coding sequences in said bicistronic or multicistronic constructs may be separated by at least one IRES (internal ribosomal entry site) sequence. In that context, suitable IRES sequences may be selected from the list of nucleic acid sequences according to SEQ ID NOs: 1566-1662 of the patent application WO2017/081082, or fragments or variants of these sequences. In this context, the disclosure of WO2017/081082 relating to IRES sequences is herewith incorporated by reference.

[0120] Preferably, the coding RNA of the composition for use may comprise about 50 to about 20000 nucleotides, or about 500 to about 10000 nucleotides, or about 1000 to about 10000 nucleotides, or preferably about 1000 to about 5000 nucleotides, or even more preferably about 1000 to about 3000 nucleotides.

[0121] In preferred embodiments, the coding RNA of the composition for use may be an mRNA, a self-replicating RNA, a circular RNA, a viral RNA, or a replicon RNA.

[0122] In embodiments, the coding RNA of the composition for use is a circular RNA. As used herein, “circular RNA” or “circRNAs” have to be understood as a circular polynucleotide constructs that encode at least one antigenic peptide or protein as defined herein. Accordingly, in preferred embodiments, said circRNA comprises at least one cds encoding at least one peptide or protein as defined herein. The production of circRNA can be performed using various methods provided in the art. Accordingly, methods for producing circular RNA as provided in U.S. Pat. Nos. 6,210,931, 5,773,244, WO1992/001813, WO2015/034925 and WO2016/011222 are incorporated herewith by reference.

[0123] In embodiments, the coding RNA of the composition for use is a replicon RNA. The term “replicon RNA” will be recognized and understood by the person of ordinary skill in the art, and is e.g. intended to be an optimized self-replicating RNA. Such constructs may include replicase elements derived from e.g. alphaviruses (e.g. SFV, SIN, VEE, or RRV) and the substitution of the structural virus proteins with the nucleic acid of interest. Alternatively, the replicase may be provided on an independent coding RNA construct. Downstream of the replicase may be a sub-genomic promoter that controls replication of the replicon RNA.

[0124] In preferred embodiments, the coding RNA of the composition for use is an mRNA.

[0125] The terms “RNA” and “mRNA” will be recognized and understood by the person of ordinary skill in the art, and are e.g. intended to be a ribonucleic acid molecule, i.e. a polymer consisting of nucleotides. These nucleotides are usually adenosine-monophosphate, uridine-monophosphate, guanosine-monophosphate and cytidine-monophosphate monomers which are connected to each other along a so-called backbone. The backbone is formed by phosphodiester bonds between the sugar, i.e. ribose, of a first and a phosphate moiety of a second, adjacent monomer. The specific succession of the monomers is called the RNA-sequence. The mRNA (messenger RNA) usually provides the nucleotide sequence that may be translated into an amino-acid sequence of a particular peptide or protein after SCS administration.

[0126] Suitably, the coding RNA of the composition for use may be modified by the addition of a 5-cap structure, which preferably stabilizes the RNA and/or enhances expression of the encoded peptide or protein.

[0127] A 5′-cap structure is of particular importance in embodiments where the coding RNA is linear, e.g. a linear mRNA or a linear replicon RNA.

[0128] In preferred embodiments, the coding RNA, in particular the mRNA of the composition for use comprises a 5′-cap structure, preferably m7G (m7G(5′)ppp(5′)G), cap0, cap1, cap2, a modified cap0 or a modified cap1 structure.

[0129] The term “5′-cap structure” as used herein will be recognized and understood by the person of ordinary skill in the art, and is e.g. intended to refer to a 5′ modified nucleotide, particularly a guanine nucleotide, positioned at the 5′-end of an RNA molecule, e.g. an mRNA molecule. Preferably, the 5′-cap structure is connected via a 5′-5-triphosphate linkage to the RNA.

[0130] 5-cap structures which may be suitable in the context of the present invention are cap0 (methylation of the first nucleobase, e.g. m7GpppN), cap1 (additional methylation of the ribose of the adjacent nucleotide of m7GpppN), cap2 (additional methylation of the ribose of the 2nd nucleotide downstream of the m7GpppN), cap3 (additional methylation of the ribose of the 3rd nucleotide downstream of the m7GpppN), cap4 (additional methylation of the ribose of the 4th nucleotide downstream of the m7GpppN), ARCA (anti-reverse cap analogue), modified ARCA (e.g. phosphothioate modified ARCA), inosine, N1-methyl-guanosine, 2′-fluoro-guanosine, 7-deaza-guanosine, 8-oxo-guanosine, 2-amino-guanosine, LNA-guanosine, and 2-azido-guanosine.

[0131] A 5′-cap (cap0 or cap1) structure may be formed in chemical RNA synthesis or RNA in vitro transcription (co-transcriptional capping) using cap analogues.

[0132] The term “cap analogue” as used herein will be recognized and understood by the person of ordinary skill in the art, and is e.g. intended to refer to a non-polymerizable di-nucleotide or tri-nucleotide that has cap functionality in that it facilitates translation or localization, and/or prevents degradation of a nucleic acid molecule, particularly of an RNA molecule, when incorporated at the 5′-end of the nucleic acid molecule. Non-polymerizable means that the cap analogue will be incorporated only at the 5′-terminus because it does not have a 5′ triphosphate and therefore cannot be extended in the 3′-direction by a template-dependent polymerase, particularly, by template-dependent RNA polymerase. Examples of cap analogues include, but are not limited to, a chemical structure selected from the group consisting of m7GpppG, m7GpppA, m7GpppC; unmethylated cap analogues (e.g. GpppG); dimethylated cap analogue (e.g. m2,7GpppG), trimethylated cap analogue (e.g. m2,2,7GpppG), dimethylated symmetrical cap analogues (e.g. m7Gpppm7G), or anti reverse cap analogues (e.g. ARCA; m7,2′OmeGpppG, m7,2′dGpppG, m7,3′OmeGpppG, m7,3′dGpppG and their tetraphosphate derivatives). Further cap analogues have been described previously (WO2008/016473, WO2008/157688, WO2009/149253, WO2011/015347, and WO2013/059475). Further suitable cap analogues in that context are described in WO2017/066793, WO2017/066781, WO2017/066791, WO2017/066789, WO2017/053297, WO2017/066782, WO2018075827 and WO2017/066797 wherein the disclosures referring to cap analogues are incorporated herewith by reference.

[0133] In embodiments, a modified cap1 structure is generated using tri-nucleotide cap analogue as disclosed in WO2017/053297, WO2017/066793, WO2017/066781, WO2017/066791, WO2017/066789, WO2017/066782, WO2018075827 and WO2017/066797. In particular, any cap structures derivable from the structure disclosed in claim 1-5 of WO2017/053297 may be suitably used to co-transcriptionally generate a modified cap1 structure. Further, any cap structures derivable from the structure defined in claim 1 or claim 21 of WO2018075827 may be suitably used to co-transcriptionally generate a modified cap1 structure.

[0134] In preferred embodiments, the 5′-cap structure may suitably be added co-transcriptionally using tri-nucleotide cap analogue as defined herein in an RNA in vitro transcription reaction as defined herein.

[0135] Preferred cap-analogues are the di-nucleotide cap analogues m7G(5′)ppp(5′)G (m7G) or 3′-O-Me-m7G(5)ppp(5′)G to co-transcriptionally generate cap0 structures. Further preferred cap-analogues are the tri-nucleotide cap analogues m7G(5′)ppp(5′)(2′OMeA)pG or m7G(5′)ppp(5′)(2′OMeG)pG to co-transcriptionally generate cap1 structures.

[0136] In other embodiments, the 5′-cap structure is formed via enzymatic capping using capping enzymes (e.g. vaccinia virus capping enzymes and/or cap-dependent 2′-O methyltransferases) to generate cap0 or cap1 or cap2 structures. In embodiments, the 5′-cap structure (cap0 or cap1) may be added using immobilized capping enzymes and/or cap-dependent 7-0 methyltransferases using methods and means disclosed in WO2016/193226.

[0137] In a particularly preferred embodiment, the coding RNA of the composition for use comprises a cap1 structure, wherein said cap1 structure may be formed enzymatically or co-transcriptionally (e.g. using m7G(5′)ppp(5′)(2′OMeA), or m7G(5′)ppp(5′)(2′OMeG) analogues).

[0138] In preferred embodiments, the coding RNA of the composition for use comprises an m7G(5′)ppp(5′)(2′OMeA) cap structure. In such embodiments, the coding RNA comprises a 5′ terminal m7G cap, and an additional methylation of the ribose of the adjacent nucleotide of m7GpppN, in that case, a 2′O methylated adenosine.

[0139] In other preferred embodiments, the coding RNA of the composition for use comprises an m7G(5′)ppp(5′)(2′OMeG) cap structure. In such embodiments, the coding RNA comprises a 5′ terminal m7G cap, and an additional methylation of the ribose of the adjacent nucleotide, in that case, a 2′O methylated guanosine.

[0140] Accordingly, whenever reference is made to suitable RNA or mRNA sequences in the context of the invention, the first nucleotide of said RNA or mRNA sequence, that is, the nucleotide downstream of the m7G(5′)ppp structure, may be a 2′O methylated guanosine or a 2′O methylated adenosine.

[0141] In embodiments, the NU content in the environment of the ribosome binding site of the coding RNA of the composition for use may be increased compared to the A/U content in the environment of the ribosome binding site of its respective wild type nucleic acid. This modification (an increased A/U content around the ribosome binding site) increases the efficiency of ribosome binding to the nucleic acid, preferably the RNA. An effective binding of the ribosomes to the ribosome binding site in turn has the effect of an efficient translation of the RNA.

[0142] Accordingly, in a particularly preferred embodiment, the coding RNA of the composition for use comprises a ribosome binding site, also referred to as “Kozak sequence” identical to or at least 80%, 85%, 90%, 95% identical to any one of the sequences SEQ ID NOs: 406, 407, or fragments or variants thereof.

[0143] In preferred embodiments, the coding RNA of the composition for use comprises at least one poly(N) sequence, e.g. at least one poly(A) sequence, at least one poly(U) sequence, at least one poly(C) sequence, or combinations thereof.

[0144] In preferred embodiments, the coding RNA of the composition for use comprises at least one poly(A) sequence.

[0145] The terms “poly(A) sequence”, “poly(A) tail” or “3′-poly(A) tail” as used herein will be recognized and understood by the person of ordinary skill in the art, and are e.g. intended to be a sequence of adenosine nucleotides, typically located at the 3′-end of a coding RNA, of up to about 1000 adenosine nucleotides. Said poly(A) sequence is essentially homopolymeric, e.g. a poly(A) sequence of e.g. 100 adenosine nucleotides has essentially the length of 100 nucleotides. In other embodiments, the poly(A) sequence may be interrupted by at least one nucleotide different from an adenosine nucleotide.

[0146] The poly(A) sequence, suitable located downstream of a 3′ UTR as defined herein, may comprise about 10 to about 500 adenosine nucleotides, about 10 to about 200 adenosine nucleotides, about 40 to about 200 adenosine nucleotides, or about 40 to about 150 adenosine nucleotides. Suitably, the length of the poly(A) sequence may be at least about or even more than about 10, 50, 64, 75, 100, 200, 300, 400, or 500 adenosine nucleotides. Suitably, the poly(A) sequence of the coding RNA may be long enough to bind at least 2, 3, 4, 5 or more monomers of PolyA Binding Proteins. In preferred embodiments, the poly(A) sequence comprises about 50 to about 250 adenosines. In a particularly preferred embodiment, the poly(A) sequence comprises about 64 adenosine nucleotides.

[0147] Preferably, the poly(A) sequence of the coding RNA is obtained from a DNA template during RNA in vitro transcription. In other embodiments, the poly(A) sequence is obtained in vitro by common methods of chemical synthesis without being necessarily transcribed from a DNA template. In other embodiments, poly(A) sequences are generated by enzymatic polyadenylation of the RNA (after RNA in vitro transcription) using commercially available polyadenylation kits and corresponding protocols known in the art, or alternatively, by using immobilized poly(A)polymerases e.g. using a methods and means as described in WO2016/174271.

[0148] In embodiments, the coding RNA may comprise a poly(A) sequence derived from a template DNA and may comprise at least one additional poly(A) sequence generated by enzymatic polyadenylation, e.g. as described in WO2016/091391.

[0149] In embodiments where enzymatic polyadenylation of RNA is used, it has to be understood that RNA or mRNA sequences as described herein, may additionally comprise about 30 to about 500 adenosine nucleotides located at the 3′ terminus/the 3′-end.

[0150] In preferred embodiments, the coding RNA may comprise at least one poly(C) sequence.

[0151] The term “poly(C) sequence” as used herein will be recognized and understood by the person of ordinary skill in the art, and are e.g. intended to be a sequence of cytosine nucleotides, typically located at the 3′-end of an RNA, of up to about 200 cytosine nucleotides.

[0152] In preferred embodiments, the poly(C) sequence, suitable located at the 3′ terminus downstream of the 3′ UTR as defined herein, comprises about 10 to about 200 cytosine nucleotides, about 10 to about 100 cytosine nucleotides, about 20 to about 70 cytosine nucleotides, about 20 to about 60 cytosine nucleotides, or about 10 to about 40 cytosine nucleotides. In a particularly preferred embodiment, the poly(C) sequence comprises about 30 cytosine nucleotides.

[0153] Preferably, the poly(C) sequence in the RNA sequence of the present invention is derived from a DNA template by RNA in vitro transcription. In other embodiments, the poly(C) sequence is obtained in vitro by common methods of chemical synthesis, or enzymatically, without being necessarily transcribed from a DNA template.

[0154] In preferred embodiments, the coding RNA of the composition for use comprises at least one histone stem-loop.

[0155] The term “histone stem-loop” (abbreviated as “hsl”) as used herein will be recognized and understood by the person of ordinary skill in the art, and is e.g. intended to refer to nucleic acid sequences predominantly found in histone mRNAs.

[0156] Histone stem-loop sequences/structures may suitably be selected from histone stem-loop sequences as disclosed in WO2012/019780, the disclosure relating to histone stem-loop sequences/histone stem-loop structures incorporated herewith by reference. A histone stem-loop sequence that may be used within the present invention may preferably be derived from formulae (I) or (II) of WO2012/019780. According to a further preferred embodiment the coding RNA may comprise at least one histone stem-loop sequence derived from at least one of the specific formulae (Ia) or (IIa) of the patent application WO2012/019780.

[0157] In particularly preferred embodiment, the coding RNA of the composition for use comprises at least one histone stem-loop sequence, wherein said histone stem-loop sequence comprises a nucleic acid sequence identical or at least 70%, 80%, 90%, 91%, 92%, 93%, 94%, 95%, 96%, 97%, 98%, or 99% identical to SEQ ID NOs: 404 or 405, or fragments or variants thereof.

[0158] In embodiments, the coding RNA of the composition for use comprises a 3′-terminal sequence element. Said 3′-terminal sequence element comprises a poly(A)sequence and a histone-stem-loop sequence, wherein said sequence element is located at the 3′ terminus of the RNA of the invention.

[0159] Accordingly, the coding RNA of the composition for use may comprise a 3′-terminal sequence element comprising or consisting of a nucleic acid sequence being identical or at least 70%, 80%, 90%, 91%, 92%, 93%, 94%, 95%, 96%, 97%, 98%, or 99% identical to SEQ ID NOs: 410-431, or a fragment or variant thereof.

[0160] In various embodiments, the coding RNA of the composition for use may comprise a 5′-terminal sequence element according to SEQ ID NOs: 408, 409, or a fragment or variant thereof. Such a 5′-terminal sequence element comprises e.g. a binding site for 17 RNA polymerase. Further, the first nucleotide of said 5′-terminal start sequence may preferably comprise a 2′O methylation, e.g. 2′O methylated guanosine or a 2′O methylated adenosine.

[0161] The coding RNA of the composition for use may be composed of a protein-coding region (“coding sequence” or “cds”), and 5′-UTR and/or 3′-UTR. UTRs may harbor regulatory sequence elements or motifs that determine RNA turnover, stability, and/or localization. Moreover, UTRs may harbor sequence elements or motifs that enhance translation. In medical application of RNA, translation of the RNA cds into at least one peptide or protein is of paramount importance to therapeutic efficacy. Certain combinations of 3′-UTRs and/or 5′-UTRs may enhance the expression of operably linked coding sequences encoding peptides or proteins as defined above. Coding RNA harboring said UTR combinations advantageously enable rapid and transient expression of encoded peptides or proteins after administration to a subject, preferably after SCS administration.

[0162] Accordingly, the coding RNA of the composition for use may comprise certain combinations of 3′-UTRs and/or 5′-UTRs, resulting in translation of the protein (e.g. therapeutic protein, CRISPR-associated endonuclease, as defined above), and hence, in expression of the protein in therapeutically relevant cells or tissues in the eye (e.g., retinal cells).

[0163] Suitably, the coding RNA of the composition for use comprises at least one heterologous 5′-UTR and/or at least one heterologous 3′-UTR. Said heterologous 5′-UTRs or 3′-UTRs may be derived from naturally occurring genes or may be synthetically engineered. In preferred embodiments, the coding RNA comprises at least one cds operably linked to at least one (heterologous) 3′-UTR and/or at least one (heterologous) 5′-UTR.

[0164] In preferred embodiments, the coding RNA of the composition for use comprises at least one heterologous 3′-UTR.

[0165] The term “3′-untranslated region” or “3′-UTR” or “3′-UTR element” will be recognized and understood by the person of ordinary skill in the art, and are e.g. intended to refer to a part of the coding RNA, located 3′ (i.e. downstream) of a cds, which is not translated into protein. A 3′-UTR may be part of an RNA, e.g. an mRNA, located between a cds and a terminal poly(A) sequence. A 3′-UTR may comprise elements for controlling gene expression, also called regulatory elements. Such regulatory elements may be, e.g., ribosomal binding sites, miRNA binding sites etc.

[0166] Preferably, the coding RNA of the composition for use comprises a 3′-UTR, which may be derivable from a gene that relates to an RNA with enhanced half-life (i.e. that provides a stable RNA).

[0167] In some embodiments, a 3′-UTR comprises one or more of a polyadenylation signal, a binding site for proteins that affect an RNA stability of location in a cell, or one or more miRNA or binding sites for miRNAs.

[0168] MicroRNAs (or miRNA) are 19-25 nucleotide long noncoding RNAs that bind to the 3′-UTR of nucleic acid molecules and down-regulate gene expression either by reducing nucleic acid molecule stability or by inhibiting translation. E.g., microRNAs are known to regulate RNA, and thereby protein expression, e.g. in liver (miR-122), heart (miR-Id, miR-149), endothelial cells (miR-17-92, miR-126), adipose tissue (let-7, miR-30c), kidney (miR-192, miR-194, miR-204), myeloid cells (miR-142-3p, miR-142-5p, miR-16, miR-21, miR-223, miR-24, miR-27), muscle (miR-133, miR-206, miR-208), and lung epithelial cells (let-7, miR-133, miR-126). The RNA of the invention may comprise one or more microRNA target sequences, microRNA sequences, or microRNA seeds. Such sequences may e.g. correspond to any known microRNA such as those taught in US Publications US2005/0261218 and US2005/0059005, the contents of which are incorporated herein by reference.

[0169] Accordingly, miRNA, or binding sites for miRNAs as defined above may be removed from the 3′-UTR or introduced into the 3′-UTR in order to tailor the expression of the RNA expression to desired cell types or tissues, preferably to desired cell types or tissues in the eye.

[0170] In preferred embodiments, the coding RNA of the composition for use comprises at least one heterologous 3′-UTR, wherein the at least one heterologous 3′-UTR comprises a nucleic acid sequence derived from a 3′-UTR of a gene selected from PSMB3, ALB7, alpha-globin (referred to as “muag”), CASP1, COX6B1, GNAS, NDUFA1 and RPS9, or from a homolog, a fragment or variant of any one of these genes.

[0171] In embodiments, the coding RNA of the composition for use may comprise a 3′-UTR derived from a ALB7 gene, wherein said 3′-UTR derived from an ALB7 gene comprises or consists of a nucleic acid sequence being identical or at least 70%, 80%, 85%, 86%, 87%, 88%, 89%, 90%, 91%, 92%, 93%, 94%, 95%, 96%, 97%, 98%, or 99% identical to SEQ ID NOs: 400 or 401 or a fragment or a variant thereof. In embodiments, the coding RNA of the composition for use may comprise a 3′-UTR derived from a alpha-globin gene, wherein said 3′-UTR derived from a alpha-globin gene (“muag”) comprises or consists of a nucleic acid sequence being identical or at least 70%, 80%, 85%, 86%, 87%, 88%, 89%, 90%, 91%, 92%, 93%, 94%, 95%, 96%, 97%, 98%, or 99% identical to SEQ ID NOs: 402 or 403 or a fragment or a variant thereof. In embodiments, the coding RNA of the composition for use may comprise a 3′-UTR derived from a PSMB3 gene, wherein said 3′-UTR derived from a PSMB3 gene comprises or consists of a nucleic acid sequence being identical or at least 70%, 80%, 85%, 86%, 87%, 88%, 89%, 90%, 91%, 92%, 93%, 94%, 95%, 96%, 97%, 98%, or 99% identical to SEQ ID NOs: 388 or 389 or a fragment or a variant thereof. In embodiments, the coding RNA of the composition for use may comprise a 3′-UTR derived from a CASP1 gene, wherein said 3′-UTR derived from a CASP1 gene comprises or consists of a nucleic acid sequence being identical or at least 70%, 80%, 85%, 86%, 87%, 88%, 89%, 90%, 91%, 92%, 93%, 94%, 95%, 96%, 97%, 98%, or 99% identical to SEQ ID NOs: 390 or 391 or a fragment or a variant thereof. In embodiments, the coding RNA of the composition for use may comprise a 3′-UTR derived from a COX6B1 gene, wherein said 3′-UTR derived from a COX6B1 gene comprises or consists of a nucleic acid sequence being identical or at least 70%, 80%, 85%, 86%, 87%, 88%, 89%, 90%, 91%, 92%, 93%, 94%, 95%, 96%, 97%, 98%, or 99% identical to SEQ ID NOs: 392 or 393 or a fragment or a variant thereof. In embodiments, the coding RNA of the composition for use may comprise a 3′-UTR derived from a GNAS gene, wherein said 3′-UTR derived from a GNAS gene comprises or consists of a nucleic acid sequence being identical or at least 70%, 80%, 85%, 86%, 87%, 88%, 89%, 90%, 91%, 92%, 93%, 94%, 95%, 96%, 97%, 98%, or 99% identical to SEQ ID NOs: 394 or 395 or a fragment or a variant thereof. In embodiments, the coding RNA of the composition for use may comprise a 3′-UTR derived from a NDUFA1 gene, wherein said 3′-UTR derived from a NDUFA1 gene comprises or consists of a nucleic acid sequence being identical or at least 70%, 80%, 85%, 86%, 87%, 88%, 89%, 90%, 91%, 92%, 93%, 94%, 95%, 96%, 97%, 98%, or 99% identical to SEQ ID NOs: 396 or 397 or a fragment or a variant thereof. In embodiments, the coding RNA of the composition for use may comprise a 3′-UTR derived from a RPS9 gene, wherein said 3′-UTR derived from a RPS9 gene comprises or consists of a nucleic acid sequence being identical or at least 70%, 80%, 85%, 86%, 87%, 88%, 89%, 90%, 91%, 92%, 93%, 94%, 95%, 96%, 97%, 98%, or 99% identical to SEQ ID NOs: 398 or 399 or a fragment or a variant thereof.

[0172] Accordingly, the coding RNA of the composition for use may suitably comprise at least one 3′-UTR comprising or consisting of a nucleic acid sequence being identical or at least 70%, 80%, 85%, 86%, 87%, 88%, 89%, 90%, 91%, 92%, 93%, 94%, 95%, 96%, 97%, 98%, or 99% identical to SEQ ID NOs: 388-403 or a fragment or a variant thereof.

[0173] In other embodiments, the coding RNA of the composition for use comprises a 3′-UTR as described in WO2016/107877, the disclosure of WO2016/107877 relating to 3′-UTR sequences herewith incorporated by reference. Suitable 3′-UTRs are SEQ ID NOs: 1 to 24 and SEQ ID NOs: 49 to 318 of WO2016/107877, or fragments or variants of these sequences. Accordingly, the 3′-UTRs of the RNA may comprise or consist of a corresponding RNA sequence of the nucleic acid sequence according SEQ ID NOs: 1 to 24 and SEQ ID NOs: 49 to 318 of WO2016/107877. In other embodiments, the coding RNA comprises a 3′-UTR as described in WO2017/036580, the disclosure of WO2017/036580 relating to 3′-UTR sequences herewith incorporated by reference. Suitable 3′-UTRs are SEQ ID NOs: 152 to 204 of WO2017/036580, or fragments or variants of these sequences. Accordingly, the 3′-UTR of the RNA may comprise or consist of a corresponding RNA sequence of the nucleic acid sequence according SEQ ID NOs: 152 to 204 of WO2017/036580. In other embodiments, the coding RNA comprises a 3′-UTR as described in WO2016022914, the disclosure of WO2016022914 relating to 3′-UTR sequences herewith incorporated by reference. Particularly preferred 3′-UTRs are nucleic acid sequences according to SEQ ID NOs: 20 to 36 of WO2016022914, or fragments or variants of these sequences. In this context, it is particularly preferred that the 3′-UTR of the RNA comprises or consists of a corresponding RNA sequence of the nucleic acid sequence according to SEQ ID NOs: 20 to 36 of WO2016022914.

[0174] In preferred embodiments, the coding RNA of the composition for use comprises at least one heterologous 5′-UTR.

[0175] The terms “5′-untranslated region” or “5′-UTR” or “5′-UTR element” will be recognized and understood by the person of ordinary skill in the art, and are e.g. intended to refer to a part the RNA, located 5′ (i.e. “upstream”) of a cds, which is not translated into protein. A 5′-UTR may be part of an RNA located 5′ of the cds. Typically, a 5′-UTR starts with the transcriptional start site and ends before the start codon of the cds. A 5′-UTR may comprise elements for controlling gene expression, called regulatory elements. Such regulatory elements may be, e.g., ribosomal binding sites, miRNA binding sites etc. The 5′-UTR may be post-transcriptionally modified, e.g. by enzymatic or post-transcriptional addition of a 5′-cap structure (see above).

[0176] Preferably, the coding RNA of the composition for use comprises a 5′-UTR, which may be derivable from a gene that relates to an RNA with enhanced half-life (i.e. that provides a stable RNA).

[0177] In some embodiments, a 5′-UTR comprises one or more of a binding site for proteins that affect an RNA stability of location in a cell, or one or more miRNA or binding sites for miRNAs (as defined above).

[0178] Accordingly, miRNA or binding sites for miRNAs as defined above may be removed from the 5′-UTR or introduced into the 5′-UTR in order to tailor the expression of the RNA expression to desired cell types or tissues, preferably in desired cell types or tissues in the eye.

[0179] In preferred embodiments, the coding RNA of the composition for use comprises at least one heterologous 5′-UTR, wherein the at least one heterologous 5′-UTR comprises a nucleic acid sequence derived from a 5′-UTR of gene selected from HSD17B4, RPL32, ASAH1, ATP5A1, MP68, NDUFA4, NOSIP, RPL31, SLC7A3, TUBB4B, and UBQLN2, or from a homolog, a fragment or variant of any one of these genes.

[0180] In embodiments, the coding RNA of the composition for use may comprise a 5′-UTR derived from a RPL32 gene, wherein said 5′-UTR derived from a RPL32 gene comprises or consists of a nucleic acid sequence being identical or at least 70%, 80%, 85%, 86%, 87%, 88%, 89%, 90%, 91%, 92%, 93%, 94%, 95%, 96%, 97%, 98%, or 99% identical to SEQ ID NOs: 386 or 387 or a fragment or a variant thereof. In embodiments, the coding RNA of the composition for use may comprise a 5′-UTR derived from a HSD17B4 gene, wherein said 5′-UTR derived from a HSD17B4 gene comprises or consists of a nucleic acid sequence being identical or at least 70%, 80%, 85%, 86%, 87%, 88%, 89%, 90%, 91%, 92%, 93%, 94%, 95%, 96%, 97%, 98%, or 99% identical to SEQ ID NOs: 366 or 367 or a fragment or a variant thereof. In embodiments, the coding RNA of the composition for use may comprise a 5′-UTR derived from a ASAH1 gene, wherein said 5′-UTR derived from a ASAH1 gene comprises or consists of a nucleic acid sequence being identical or at least 70%, 80%, 85%, 86%, 87%, 88%, 89%, 90%, 91%, 92%, 93%, 94%, 95%, 96%, 97%, 98%, or 99% identical to SEQ ID NOs: 368 or 369 or a fragment or a variant thereof. In embodiments, the coding RNA of the composition for use may comprise a 5′-UTR derived from a ATP5A1 gene, wherein said 5′-UTR derived from a ATP5A1 gene comprises or consists of a nucleic acid sequence being identical or at least 70%, 80%, 85%, 86%, 87%, 88%, 89%, 90%, 91%, 92%, 93%, 94%, 95%, 96%, 97%, 98%, or 99% identical to SEQ ID NOs: 370 or 371 or a fragment or a variant thereof. In embodiments, the coding RNA of the composition for use may comprise a 5′-UTR derived from a MP68 gene, wherein said 5′-UTR derived from a MP68 gene comprises or consists of a nucleic acid sequence being identical or at least 70%, 80%, 85%, 86%, 87%, 88%, 89%, 90%, 91%, 92%, 93%, 94%, 95%, 96%, 97%, 98%, or 99% identical to SEQ ID NOs: 372 or 373 or a fragment or a variant thereof. In embodiments, the coding RNA of the composition for use may comprise a 5′-UTR derived from a NDUFA4 gene, wherein said 5′-UTR derived from a NDUFA4 gene comprises or consists of a nucleic acid sequence being identical or at least 70%, 80%, 85%, 86%, 87%, 88%, 89%, 90%, 91%, 92%, 93%, 94%, 95%, 96%, 97%, 98%, or 99% identical to SEQ ID NOs: 374 or 375 or a fragment or a variant thereof. In embodiments, the coding RNA of the composition for use may comprise a 5′-UTR derived from a NOSIP gene, wherein said 5′-UTR derived from a NOSIP gene comprises or consists of a nucleic acid sequence being identical or at least 70%, 80%, 85%, 86%, 87%, 88%, 89%, 90%, 91%, 92%, 93%, 94%, 95%, 96%, 97%, 98%, or 99% identical to SEQ ID NOs: 376 or 377 or a fragment or a variant thereof. In embodiments, the RNA may comprise a 5′-UTR derived from a RPL31 gene, wherein said 5′-UTR derived from a RPL31 gene comprises or consists of a nucleic acid sequence being identical or at least 70%, 80%, 85%, 86%, 87%, 88%, 89%, 90%, 91%, 92%, 93%, 94%, 95%, 96%, 97%, 98%, or 99% identical to SEQ ID NOs: 378 or 379 or a fragment or a variant thereof. In embodiments, the coding RNA of the composition for use may comprise a 5′-UTR derived from a SLC7A3 gene, wherein said 5′-UTR derived from a SLC7A3 gene comprises or consists of a nucleic acid sequence being identical or at least 70%, 80%, 85%, 86%, 87%, 88%, 89%, 90%, 91%, 92%, 93%, 94%, 95%, 96%, 97%, 98%, or 99% identical to SEQ ID NOs: 380 or 381 or a fragment or a variant thereof. In embodiments, the coding RNA of the composition for use may comprise a 5′-UTR derived from a TUBB4B gene, wherein said 5′-UTR derived from a TUBB4B gene comprises or consists of a nucleic acid sequence being identical or at least 70%, 80%, 85%, 86%, 87%, 88%, 89%, 90%, 91%, 92%, 93%, 94%, 95%, 96%, 97%, 98%, or 99% identical to SEQ ID NOs: 382 or 383 or a fragment or a variant thereof. In embodiments, the coding RNA of the composition for use may comprise a 5′-UTR derived from a UBQLN2 gene, wherein said 5′-UTR derived from a UBQLN2 gene comprises or consists of a nucleic acid sequence being identical or at least 70%, 80%, 85%, 86%, 87%, 88%, 89%, 90%, 91%, 92%, 93%, 94%, 95%, 96%, 97%, 98%, or 99% identical to SEQ ID NO: 384 or 385 or a fragment or a variant thereof.

[0181] Accordingly, the coding RNA of the composition for use may suitably comprise at least one 5′-UTR comprising or consisting of a nucleic acid sequence being identical or at least 70%, 80%, 85%, 86%, 87%, 88%, 89%, 90%, 91%, 92%, 93%, 94%, 95%, 96%, 97%, 98%, or 99% identical to SEQ ID NOs: 366403 or a fragment or a variant thereof.

[0182] In other embodiments, the coding RNA of the composition for use comprises a 5′-UTR as described in WO2013/143700, the disclosure of WO2013/143700 relating to 5′-UTR sequences herewith incorporated by reference. Particularly preferred 5′-UTRs are nucleic acid sequences derived from SEQ ID NOs: 1-1363, SEQ ID NO: 1395, SEQ ID NO: 1421 and SEQ ID NO: 1422 of WO2013/143700, or fragments or variants of these sequences. In this context, it is preferred that the 5′-UTR of the RNA comprises or consists of a corresponding RNA sequence of the nucleic acid sequence according SEQ ID NOs: 1-1363, SEQ ID NO: 1395, SEQ ID NO: 1421 and SEQ ID NO: 1422 of WO2013/143700. In other embodiments, the coding RNA comprises a 5′-UTR as described in WO2016/107877, the disclosure of WO2016/107877 relating to 5′-UTR sequences herewith incorporated by reference. Particularly preferred 5′-UTRs are nucleic acid sequences according to SEQ ID NOs: 25 to 30 and SEQ ID NOs: 319 to 382 of WO2016/107877, or fragments or variants of these sequences. In this context, it is particularly preferred that the 5′-UTR of the RNA comprises or consists of a corresponding RNA sequence of the nucleic acid sequence according SEQ ID NOs: 25 to 30 and SEQ ID NOs: 319 to 382 of WO2016/107877. In other embodiments, the coding RNA comprises a 5′-UTR as described in WO2017/036580, the disclosure of WO2017/036580 relating to 5-UTR sequences herewith incorporated by reference. Particularly preferred 5′-UTRs are nucleic acid sequences according to SEQ ID NOs: 1 to 151 of WO2017/036580, or fragments or variants of these sequences. In this context, it is particularly preferred that the 5′-UTR of the RNA comprises or consists of a corresponding RNA sequence of the nucleic acid sequence according to SEQ ID NOs: 1 to 151 of WO2017/036580. In other embodiments, the coding RNA comprises a 5′-UTR as described in WO2016022914, the disclosure of WO2016022914 relating to 5′-UTR sequences herewith incorporated by reference. Particularly preferred 5′-UTRs are nucleic acid sequences according to SEQ ID NOs: 3 to 19 of WO2016022914, or fragments or variants of these sequences. In this context, it is particularly preferred that the 5′-UTR of the RNA comprises or consists of a corresponding RNA sequence of the nucleic acid sequence according to SEQ ID NOs: 3 to 19 of WO2016022914.

[0183] Suitably, in preferred embodiments, the coding RNA of the composition for use comprises at least one cds encoding at least one peptide or protein as specified herein (e.g. therapeutic protein, CRISPR-associated endonuclease), operably linked to a 3′-UTR and/or a 5′-UTR selected from the following 5′-UTR/3′-UTR combinations: a-1 (HSD17B4/PSMB3), a-2 (NDUFA4/PSMB3), a-3 (SLC7A3/PSMB3), a-4 (NOSIP/PSMB3), a-5 (MP68/PSMB3), b-1 (UBQLN2/RPS9), b-2 (ASAH1/RPS9), b-3 (HSD17B4/RPS9), b-4 (HSD17B4/CASP1), b-5 (NOSIP/COX6B1), c-1 (NDUFA4/RPS9), c-2 (NOSIP/NDUFA1), c-3 (NDUFA4/COX6B1), c-4 (NDUFA4/NDUFA1), c-5 (ATP5A1/PSMB3), d-1 (RpI31/PSMB3), d-2 (ATP5A1/CASP1), d-3 (SLC7A3/GNAS), d-4 (HSD17B4/NDUFA1), d-5 (S1c7a3/Ndufa1), e-1 (TUBB4B/RPS9), e-2 (RPL31/RPS9), e-3 (MP68/RPS9), e-4 (NOSIP/RPS9), e-5 (ATP5A1/RPS9), e-6 (ATP5A1/COX6B1), f-1 (ATP5A1/GNAS), f-2 (ATP5A1/NDUFA1), f-3 (HSD17B4/COX6B1), f-4 (HSD17B4/GNAS), f-5 (MP68/COX6B1), g-1 (MP68/NDUFA1), g-2 (NDUFA4/CASP1), g-3 (NDUFA4/GNAS), g-4 (NOSIP/CASP1), g-5 (RPL31/CASP1), h-1 (RPL31/COX6B1), h-2 (RPL31/GNAS), h-3 (RPL31/NDUFA1), h-4 (S1c7a3/CASP1), h-5 (SLC7A3/COX6B1), i-1 (SLC7A3/RPS9), i-2 (RPL32/ALB7), i-2 (RPL32/ALB7), or i-3 (α-globin gene/−).

[0184] In various embodiments, the coding RNA of the composition for use comprises the following elements, preferably in 5′- to 3′-direction:
[0185] A) 5′-cap structure, preferably as specified herein;
[0186] B) 5′-terminal start element, preferably as specified herein;
[0187] C) optionally, a cleavage site for a catalytic nucleic acid molecule, preferably as specified herein;
[0188] D) optionally, 5′-UTR, preferably as specified herein;
[0189] E) a ribosome binding site, preferably as specified herein;
[0190] F) at least one coding sequence, preferably as specified herein;
[0191] G) 3′-UTR, preferably as specified herein;
[0192] H) optionally, poly(A) sequence, preferably as specified herein;
[0193] I) optionally, poly(C) sequence, preferably as specified herein;
[0194] J) optionally, histone stem-loop preferably as specified herein;
[0195] K) optionally, 3′-terminal sequence element, preferably as specified herein.

[0196] In preferred embodiments the coding RNA of the composition for use comprises the following elements preferably in 5′- to 3′-direction:
[0197] A) 5′-cap structure selected from m7G(5′), m7G(5′)ppp(6)(2′OMeA), or m7G(5′)ppp(5′)(2′OMeG);
[0198] B) 5′-terminal start element selected from SEQ ID NOs: 408 or 409 or fragments or variants thereof;
[0199] C) optionally, a cleavage site for a catalytic nucleic acid molecule, preferably as specified herein;
[0200] D) optionally, 5′-UTR selected from SEQ ID NOs: 366-387 or fragments or variants thereof;
[0201] E) a ribosome binding site selected from SEQ ID NOs: 406 or 407 or fragments or variants thereof;
[0202] F) at least one coding sequence encoding at least one protein selected from SEQ ID NOs: 2-365, 436 or fragments or variants thereof;
[0203] G) 3′-UTR selected from SEQ ID NOs: 388-403;
[0204] H) optionally, poly(A) sequence comprising about 50 to about 500 adenosines;
[0205] I) optionally, poly(C) sequence comprising about 10 to about 100 cytosines;
[0206] J) optionally, histone stem-loop (sequence) selected from SEQ ID NOs: 404 or 405;
[0207] K) optionally, 3′-terminal sequence element SEQ ID NOs: 410-431.

[0208] In particularly preferred embodiments the coding RNA of the composition for use comprises the following elements A to G in 5′ to 3′ direction:
[0209] A) 5′-cap structure selected from m7G(5′), m7G(5′)ppp(5′)(2′OMeA), or m7G(5′)ppp(5′)(2′OMeG);
[0210] B) 5′-terminal start element selected from SEQ ID NOs: 408 or 409 or fragments or variants thereof;
[0211] C) 3′-UTR as specified herein;
[0212] D) a ribosome binding site selected from SEQ ID NOs: 406 or 407 or fragments or variants thereof;
[0213] E) at least one coding sequence encoding at least one protein selected from SEQ ID NOs: 2-365, 436 or fragments or variants thereof;
[0214] F) 5′-UTR as specified herein;
[0215] G) poly(A) sequence comprising about 50 to about 500 adenosines, preferably about 64 adenosines;

[0216] and

[0217] wherein the 3′-UTR and/or 5′-UTR element is selected from UTR combinations according to a-1, a-2, a-3, a-4, a-5, b-1, b-2, b-3, b-4, b-5, c-1, c-2, c-3, c-4, c-5, d-1, d-2, d-3, d-4, d-5, e-1, e-2, e-3, e-4, e-5, e-6, f-1, f-2, f-3, f-4, f-5, g-1, g-2, g-3, g-4, g-5, h-1, h-2, h-3, h-4, h-5, i-1, i-2, or i-3, as specified herein, wherein said RNA optionally comprises a poly(C) sequence comprising about 10 to about 100 cytosines, wherein said RNA optionally comprises a histone stem-loop selected from SEQ ID NOs: 404 or 405.

[0218] In preferred embodiments, the coding RNA of the composition for use comprises or consists of an RNA sequence which is identical or at least 70%, 80%, 85%, 86%, 87%, 88%, 89%, 90%, 91%, 92%, 93%, 94%, 95%, 96%, 97%, 98%, or 99% identical to a nucleic acid sequence selected from the group consisting of SEQ ID NOs: 11011-11042; 11249-11280; 11131-11162; 11367-11398; 11485-11516; 11603-11634; 11721-11752; 11839-11870; 11044-11116; 11282-11354; 11164-11236; 11400-11472; 11518-11590; 11636-11708; 11754-11826; 11872-11944; 11011-11042; 11249-11280; 11044-11116; 11282-11354; 11131-11162; 11367-11398; 11485-11516; 11603-11634; 11721-11752; 11839-11870; 11164-11236; 11400-11472; 11518-11590; 11636-11708; 11754-11826; 11872-11944; 11120-11122; 11240; 11241; 11358; 11359; 11476; 11477; 11594; 11595; 11712; 11713; 11830; 11831; 11948; 11949; 11123-11130; 11360-11366; 11242-11248; 11478-11484; 11596-11602; 11714-11720; 11832-11838; 11950-11956 of published PCT patent application WO2018/172556, said RNA sequences from WO2018/172556 herewith incorporated by reference.

[0219] The composition for use may comprise a safe and effective amount of the coding RNA as specified herein. As used herein, “safe and effective amount” means an amount of the coding RNA that is sufficient to results in expression and/or activity of the encoded protein in the eye after administration via SCS delivery. At the same time, a “safe and effective amount” is small enough to avoid serious side-effects of the coding RNA/of the composition via SCS delivery.

[0220] A “safe and effective amount” of the coding RNA of the composition for use will furthermore vary in connection with the particular condition to be treated and also with the age and physical condition of the patient to be treated, the severity of the condition, the duration of the treatment, the nature of the accompanying therapy, of the particular pharmaceutically acceptable carrier used etc. Moreover, the “safe and effective amount” of the RNA or the composition as described herein may depend from application route (e.g. intravitreal, sub-retinal, SCS), application device (needle injection, injection device), and/or complexation/formulation (e.g. RNA in association with a polymeric carrier or LNP). Moreover, the “safe and effective amount” of the RNA or the composition may depend from the condition of the treated subject (infant, immunocompromised human subject etc.).

[0221] In the context of the invention, a “composition” refers to any type of composition in which the specified ingredients (e.g. RNA encoding peptide or protein as specified above e.g. in association with a polymeric carrier or LNP), may be incorporated, optionally along with any further constituents, usually with at least one pharmaceutically acceptable carrier or excipient. The composition may be a dry composition such as a powder or granules, or a solid unit such as a lyophilized form. Alternatively, the composition may be in liquid form, and each constituent may be independently incorporated in dissolved or dispersed (e.g. suspended or emulsified) form.

[0222] In preferred embodiments, the composition for use comprises at least one coding RNA and at least one pharmaceutically acceptable carrier or excipient. Accordingly, the composition for use is preferably pharmaceutical composition. Preferably, the carrier or excipient is suitable for ocular administration, preferably for SCS administration.

[0223] The term “pharmaceutically acceptable carrier” or “pharmaceutically acceptable excipient” as used herein preferably includes the liquid or non-liquid basis of the composition for administration. If the composition is provided in liquid form, the carrier may be water, e.g. pyrogen-free water; isotonic saline or buffered (aqueous) solutions, e.g. phosphate, citrate etc. buffered solutions. Water or preferably a buffer, more preferably an aqueous buffer, may be used, containing a sodium salt, preferably at least 50 mM of a sodium salt, a calcium salt, preferably at least 0.01 mM of a calcium salt, and optionally a potassium salt, preferably at least 3 mM of a potassium salt. According to preferred embodiments, the sodium, calcium and, optionally, potassium salts may occur in the form of their halogenides, e.g. chlorides, iodides, or bromides, in the form of their hydroxides, carbonates, hydrogen carbonates, or sulfates, etc. Examples of sodium salts include NaCl, NaI, NaBr, Na₂CO₃, NaHCO₃, Na₂SO₄, examples of the optional potassium salts include KCl, KI, KBr, K₂CO₃, KHCO₃, K₂SO₄, and examples of calcium salts include CaCl₂, CaI₂, CaBr₂, CaCO₃, CaSO₄, Ca(OH)₂.

[0224] Furthermore, organic anions of the aforementioned cations may be in the buffer. Accordingly, in embodiments, the composition for use may comprise pharmaceutically acceptable carriers or excipients using one or more pharmaceutically acceptable carriers or excipients to e.g. increase stability, increase cell transfection, permit the sustained or delayed, increase the translation of encoded protein in vivo, and/or alter the release profile of encoded protein in vivo. In addition to traditional excipients such as any and all solvents, dispersion media, diluents, or other liquid vehicles, dispersion or suspension aids, surface active agents, isotonic agents, thickening or emulsifying agents, preservatives, excipients of the present invention can include, without limitation, lipidoids, liposomes, lipid nanoparticles, polymers, lipoplexes, core-shell nanoparticles, peptides, proteins, cells transfected with polynucleotides, hyaluronidase, nanoparticle mimics and combinations thereof. In embodiments, one or more compatible solid or liquid fillers or diluents or encapsulating compounds may be used as well, which are suitable for administration to a subject. The term “compatible” as used herein means that the constituents of the composition are capable of being mixed with the at least one RNA and, optionally, a plurality of RNAs of the composition, in such a manner that no interaction occurs, which would substantially reduce the biological activity or the pharmaceutical effectiveness of the composition under typical use conditions (e.g., SCS administration). Pharmaceutically acceptable carriers or excipients must have sufficiently high purity and sufficiently low toxicity to make them suitable for administration to a subject to be treated. Compounds which may be used as pharmaceutically acceptable carriers or excipients may be sugars, such as, for example, lactose, glucose, trehalose, mannose, and sucrose; starches, such as, for example, corn starch or potato starch; dextrose; cellulose and its derivatives, such as, for example, sodium carboxymethylcellulose, ethylcellulose, cellulose acetate; powdered tragacanth; malt; gelatin; tallow; solid glidants, such as, for example, stearic acid, magnesium stearate; calcium sulfate; vegetable oils, such as, for example, groundnut oil, cottonseed oil, sesame oil, olive oil, corn oil and oil from theobroma; polyols, such as, for example, polypropylene glycol, glycerol, sorbitol, mannitol and polyethylene glycol; alginic acid.

[0225] The term “subject”, “patient” or “individual” as used herein generally includes humans and non-human animals and preferably mammals, including chimeric and transgenic animals and disease models. Subjects to which administration of the compositions, preferably the pharmaceutical composition, is contemplated include, but are not limited to, humans and/or other primates; mammals, including commercially relevant mammals such as cattle, pigs, horses, sheep, cats, dogs; and/or birds, including commercially relevant birds such as poultry, chickens, ducks, geese, and/or turkeys. Preferably, the term “subject” refers a non-human primate or a human, most preferably a human.

[0226] In preferred embodiments, a “subject in need of treatment”, or a “subject in need thereof” in the context of the invention is a human subject.

[0227] In embodiments, the composition for use may comprise a plurality or at least more than one of the coding RNA species as defined above, wherein each coding RNA species may encode a different peptide or protein.

[0228] In embodiments, the composition for use comprises more than one or a plurality, e.g. 2, 3, 4, 5, 6, 7, 8, 9, 10, 11, 12, 13, 14, 15 of different coding RNAs as defined above.

[0229] In a further preferred embodiment, the composition for use comprises at least one coding RNA encoding a CRISPR-associated protein, preferably at least one RNA which is identical or at least 70%, 80%, 85%, 86%, 87%, 88%, 89%, 90%, 91%, 92%, 93%, 94%, 95%, 96%, 97%, 98%, or 99% identical to a nucleic acid sequence selected from the group consisting of SEQ ID NOs: 11011-11042; 11249-11280; 11131-11162; 11367-11398; 11485-11516; 11603-11634; 11721-11752; 11839-11870; 11044-11116; 11282-11354; 11164-11236; 11400-11472; 11518-11590; 11636-11708; 11754-11826; 11872-11944; 11011-11042; 11249-11280; 11044-11116; 11282-11354; 11131-11162; 11367-11398; 11485-11516; 11603-11634; 11721-11752; 11839-11870; 11164-11236; 11400-11472; 11518-11590; 11636-11708; 11754-11826; 11872-11944; 11120-11122; 11240; 11241; 11358; 11359; 11476; 11477; 11594; 11595; 11712; 11713; 11830; 11831; 11948; 11949; 11123-11130; 11360-11366; 11242-11248; 11478-11484; 11596-11602; 11714-11720; 11832-11838; 11950-11956, of published PCT patent application WO2018/172556, and additionally, at least one guide RNA. Suitably, SCS administration of the composition leads to expression of the encoded CRISPR-associated protein (provided by the coding RNA) in the eye, preferably in therapeutically relevant target cells of the eye (as defined above), preferably amenable to treatment by knocking in, knocking out, manipulating or modulating the expression of a gene of interest, well-orchestrated by the guide RNA of the composition. The respective guide RNA of the composition may be chosen based on the gene of interest associated with a deficiency, disease or disorder as defined above.

[0230] For the production of a composition for use comprising at least 2, 3, 4, 5, 6, 7, 8, 9, 10 RNA constructs, methods as disclosed in published patent application WO2017/1090134 are preferably used and adapted accordingly. In embodiments where guide RNA is comprised in the composition, said guide RNA may alternatively be produced by common chemical RNA synthesis methods.

[0231] In embodiments, the composition for use may further comprise an anti-inflammatory drug, a vascular endothelial growth factor (VEGF) modulator (e.g., anti-VEGF antibody), a platelet derived growth factor (PDGF) modulator, an angiogenesis inhibitor, an immunosuppressive agent, a vascular permeability inhibitor, or a combination thereof. In embodiments, the composition may comprise modulators and/or activators of any of the provided protein targets of List 1. In other embodiments, the composition for use may comprise at least one of the agents provided in paragraphs [1263] to [1276] of published PCT application WO2017/192565, the content herewith incorporated by reference.

[0232] In embodiments, the coding RNA comprised in a composition for use is provided in an amount of about 100 ng to about 500 μg, about 1 μg to about 500 μg, about 1 μg to about 400 μg, about 1 μg to about 300 μg, about 1 μg to about 200 μg, about 1 μg to about 100 μg, about 1 μg to about 50 μg, about 1 μg to about 25 μg, about 1 μg to about 10 μg, specifically, in an amount of about 1 μg, about 2 μg, about 3 μg, about 4 μg, about 5 μg, about 6 μg, about 7 μg, about 8 μg, about 9 μg, about 10 μg, about 15 μg, about 20 μg, about 25 μg, about 30 μg, about 35 μg, about 40 μg, about 45 μg, about 50 μg, about 60 μg, about 70 μg, about 80 μg, about 90 μg, about 100 μg, about 200 μg, about 300 μg, about 400 μg, about 500 μg.

[0233] In a preferred embodiment, the at least one coding RNA of the composition for use is complexed or associated with, or at least partially complexed or partially associated with one or more cationic or polycationic compound, preferably cationic or polycationic polymer, cationic or polycationic polysaccharide, cationic or polycationic lipid, cationic or polycationic protein, or cationic or polycationic peptide, or any combinations thereof.

[0234] The term “cationic or polycationic compound” as used herein will be recognized and understood by the person of ordinary skill in the art, and are e.g. intended to refer to a charged molecule, which is positively charged at a pH value ranging from about 1 to 9, at a pH value ranging from about 3 to 8, at a pH value ranging from about 4 to 8, at a pH value ranging from about 5 to 8, more preferably at a pH value ranging from about 6 to 8, even more preferably at a pH value ranging from about 7 to 8, most preferably at a physiological pH, e.g. ranging from about 7.2 to about 7.5. Accordingly, a cationic component, e.g. a cationic peptide, cationic protein, cationic polymer, cationic polysaccharide, cationic lipid may be any positively charged compound or polymer which is positively charged under physiological conditions. A “cationic or polycationic peptide or protein” may contain at least one positively charged amino acid, or more than one positively charged amino acid, e.g. selected from Arg, His, Lys or Orn. Accordingly, “polycationic” components are also within the scope exhibiting more than one positive charge under the given conditions.

[0235] Cationic or polycationic compounds, being particularly preferred may be selected from the following list of cationic or polycationic peptides or proteins of fragments thereof: protamine, nucleoline, spermine or spermidine, or other cationic peptides or proteins, such as poly-L-lysine (PLL), poly-arginine, basic polypeptides, cell penetrating peptides (CPPs), including HIV-binding peptides, HIV-1 Tat (HIV), Tat-derived peptides, Penetratin, VP22 derived or analog peptides, HSV VP22 (Herpes simplex), MAP, KALA or protein transduction domains (PTDs), PpT620, prolin-rich peptides, arginine-rich peptides, lysine-rich peptides, MPG-peptide(s), Pep-1, L-oligomers, Calcitonin peptide(s), Antennapedia-derived peptides, pAntp, plsI, FGF, Lactoferrin, Transportan, Buforin-2, Bac715-24, SynB, SynB(1), pVEC, hCT-derived peptides, SAP, or histones. More preferably, the coding RNA is complexed with one or more polycations, preferably with protamine or oligofectamine, most preferably with protamine.

[0236] Further preferred cationic or polycationic compounds, which can be used as complexation agent may include cationic polysaccharides, e.g. chitosan, polybrene etc.; cationic lipids, e.g. DOTMA, DMRIE, di-C14-amidine, DOTIM, SAINT, DC-Chol, BGTC, CTAP, DOPC, DODAP, DOPE: Dioleyl phosphatidylethanol-amine, DOSPA, DODAB, DOIC, DMEPC, DOGS, DIMRI, DOTAP, DC-6-14, CLIP1, CLIP6, CLIP9, oligofectamine; or cationic or polycationic polymers, e.g. modified polyaminoacids, such as beta-aminoacid-polymers or reversed polyamides, etc., modified polyethylenes, such as PVP etc., modified acrylates, such as pDMAEMA etc., modified amidoamines such as pAMAM etc., modified polybetaaminoester (PBAE), such as diamine end modified 1,4 butanediol diacrylate-co-5-amino-1-pentanol polymers, etc., dendrimers, such as polypropylamine dendrimers or pAMAM based dendrimers, etc., polyimine(s), such as PEI, poly(propyleneimine), etc., polyallylamine, sugar backbone based polymers, such as cyclodextrin based polymers, dextran based polymers, etc., silan backbone based polymers, such as PMOXA-PDMS copolymers, etc., blockpolymers consisting of a combination of one or more cationic blocks (e.g. selected from a cationic polymer as mentioned above) and of one or more hydrophilic or hydrophobic blocks (e.g. polyethyleneglycole); etc.

[0237] In this context it is particularly preferred that the coding RNA of the composition for use is complexed or at least partially complexed with a cationic or polycationic compound and/or a polymeric carrier, preferably cationic proteins or peptides. In this context, the disclosure of WO2010/037539 and WO2012/113513 is incorporated herewith by reference. Partially means that only a part of the RNA of the composition is complexed with a cationic compound and that the rest of the RNA is present in uncomplexed form (“free”).

[0238] In this context it is particularly preferred that the coding RNA of the composition is complexed, or at least partially complexed with protamine. Preferably, the molar ratio of the nucleic acid, particularly the RNA of the protamine-complexed RNA to the free RNA may be selected from a molar ratio of about 0.001:1 to about 1:0.001, including a ratio of about 1:1. Suitably, the complexed RNA is complexed with protamine by addition of protamine-trehalose solution to the RNA sample at a RNA:protamine weight to weight ratio (w/w) of 2:1.

[0239] Further preferred cationic or polycationic proteins or peptides that may be used for complexation can be derived from formula (Arg)I;(Lys)m;(His)n;(Orn)o;(Xaa)x of the patent application WO2009/030481 or WO2011/026641, the disclosure of WO2009/030481 or WO2011/026641 relating thereto incorporated herewith by reference.

[0240] In preferred embodiments, the at least one coding RNA is complexed or at least partially complexed with at least one cationic or polycationic proteins or peptides preferably selected from SEQ ID NOs: 432-435, 437 or any combinations thereof.

[0241] According to embodiments, the composition comprises at least one coding RNA as defined herein, and a polymeric carrier.

[0242] The term “polymeric carrier” as used herein will be recognized and understood by the person of ordinary skill in the art, and is e.g. intended to refer to a compound that facilitates transport and/or complexation of another compound (e.g. RNA cargo). A polymeric carrier is typically a carrier that is formed of a polymer. A polymeric carrier may be associated to its cargo (e.g. RNA) by covalent or non-covalent interaction. A polymer may be based on different subunits, such as a copolymer.

[0243] Suitable polymeric carriers in that context may include, e.g., polyacrylates, polyalkycyanoacrylates, polylactide, polylactide-polyglycolide copolymers, polycaprolactones, dextran, albumin, gelatin, alginate, collagen, chitosan, cyclodextrins, protamine, PEGylated protamine, PEGylated PLL and polyethylenimine (PEI), dithiobis(succinimidylpropionate) (DSP), Dimethyl-3,3′-dithiobispropionimidate (DTBP), poly(ethylene imine) biscarbamate (PEIC), poly(L-lysine) (PLL), histidine modified PLL, poly(N-vinylpyrrolidone) (PVP), poly(propylenimine (PPI), poly(amidoamine) (PAMAM), poly(amido ethylenimine) (SS-PAEI), triehtylenetetramine (TETA), poly(β-aminoester), poly(4-hydroxy-L-proine ester) (PHP), poly(allylamine), poly(a[4-aminobutyl]-L-glycolic acid (PAGA), Poly(D,L-lactic-co-glycolid acid (PLGA), Poly(N-ethyl-4-vinylpyridinium bromide), poly(phosphazene)s (PPZ), poly(phosphoester)s (PPE), poly(phosphoramidate)s (PPA), poly(N-2-hydroxypropylmethacrylamide) (pHPMA), poly(2-(dimethylamino)ethyl methacrylate) (pDMAEMA), poly(2-aminoethyl propylene phosphate) PPE_EA), galactosylated chitosan, N-dodecylated chitosan, histone, collagen and dextran-spermine. In one embodiment, the polymer may be an inert polymer such as, but not limited to, PEG. In one embodiment, the polymer may be a cationic polymer such as, but not limited to, PEI, PLL, TETA, poly(allylamine), Poly(N-ethyl-4-vinylpyridinium bromide), pHPMA and pDMAEMA. In one embodiment, the polymer may be a biodegradable PEI such as, but not limited to, DSP, DTBP and PEIC. In one embodiment, the polymer may be biodegradable such as, but not limited to, histine modified PLL, SS-PAEI, poly(β-aminoester), PHP, PAGA, PLGA, PPZ, PPE, PPA and PPE-EA.

[0244] When PEI is present, it may be branched PEI of a molecular weight ranging from 10 to 40 kDA, e.g., 25 kDa branched PEI (Sigma #408727).

[0245] In some embodiments, the polymeric carrier comprises PEI. In some embodiments, PEI is branched PEI. PEI may be a branched PEI of a molecular weight ranging from 10 to 40 kDA, e.g., 25 kDa. In some embodiments, PEI is linear PEI. In some embodiments, the PEI nanoparticle has a mean diameter of or less than about 60 nm (e.g., of or less than about 55 nm, of or less than about 50 nm, of or less than about 45 nm, of or less than about 40 nm, of or less than about 35 nm, of or less than about 30 nm, or of or less than about 25 nm). Suitable nanoparticles may be in the range of 25 nm to 60 nm, e.g. 30 nm to 50 nm. As used herein, the mean diameter may be represented by the z-average as determined by dynamic light scattering as commonly known in the art.

[0246] A suitable polymeric carrier may be a polymeric carrier formed by disulfide-crosslinked cationic compounds. The disulfide-crosslinked cationic compounds may be the same or different from each other. The polymeric carrier can also contain further components (e.g. lipidoid compound). The polymeric carrier used according to the present invention may comprise mixtures of cationic peptides, proteins or polymers and optionally further components as defined herein, which are crosslinked by disulfide bonds (via —SH groups).

[0247] In this context, polymeric carriers according to formula (Ia) {(Arg)I;(Lys)m;(His)n;(Orn)o;(Xaa′)x(Cys)y} and formula (Ib) Cys{(Arg)I;(Lys)m;(His)n;(Orn)o;(Xaa)x}Cys of published PCT application WO2012/013326 are preferred, the disclosure of WO2012/013326 relating thereto incorporated herewith by reference.

[0248] In embodiments, the polymeric carrier used to complex the at least one coding RNA may be derived from a polymeric carrier molecule according formula (L-P¹-S-[S-P²-S]ₙ-S-P³-L) of published PCT application WO2011/026641, the disclosure of WO2011/026641 relating thereto incorporated herewith by reference.

[0249] In embodiments, the polymeric carrier compound is formed by, or comprises, or consists of the peptide elements CysArg12Cys (SEQ ID NO: 432) or CysArg12 (SEQ ID NO: 433) or TrpArg12Cys (SEQ ID NO: 434). In other embodiments, the polymeric carrier compound is formed by, or comprises, or consists of the peptide elements according to SEQ ID NO: 435 or 437.

[0250] In particularly preferred embodiments, the polymeric carrier compound consists of a (R₁₂C)—(R₁₂C) dimer, a (WR₁₂C)—(WR₁₂C) dimer, or a (CR₁₂)—(CR₁₂C)—(CR₁₂) trimer, wherein the individual peptide elements in the dimer (e.g. (WR₁₂C)), or the trimer (e.g. (CR₁₂)), are connected via —SH groups.

[0251] In a preferred embodiments, the at least one coding RNA of the composition for use is complexed or associated with a polyethylene glycol/peptide polymer comprising HO-PEG5000-S-(S-CHHHHHHRRRRHHHHHHC-S-)7-S-PEG5000-OH (SEQ ID NO: 435 as peptide monomer).

[0252] In a preferred embodiments, the at least one coding RNA of the composition for use is complexed or associated with a polyethylene glycol/peptide polymer comprising HO-PEG5000-S-(S-CHHHHHHRRRRHHHHHHC-S-)4-S-PEG5000-OH (SEQ ID NO: 435 as peptide monomer).

[0253] In another preferred embodiments, the at least one coding RNA of the composition for use is complexed or associated with a polyethylene glycol/peptide polymer comprising HO-PEG5000-S-(S-CGHHHHHRRRRHHHHHGC-S-)7-S-PEG5000-OH (SEQ ID NO: 437 as peptide monomer).

[0254] In particularly preferred embodiments, the at least one coding RNA of the composition for use is complexed or associated with a polyethylene glycol/peptide polymer comprising HO-PEG5000-S-(S-CGHHHHHRRRRHHHHHGC-S-)4-S-PEG5000-OH (SEQ ID NO: 437 as peptide monomer).

[0255] In other embodiments, the composition comprises at least one coding RNA complexed or associated with polymeric carriers and, optionally, with at least one lipid or lipidoid component as described in published PCT applications WO2017/212008A1, WO2017/212006A1, WO2017/212007A1, and WO2017/212009A1. In this context, the disclosures of WO2017/212008A1, WO2017/212006A1, WO2017/212007A1, and WO2017/212009A1 are herewith incorporated by reference.

[0256] In a particularly preferred embodiment, the polymeric carrier is a peptide polymer, preferably a polyethylene glycol/peptide polymer as defined above, and a lipid component, preferably a lipidoid component, more preferably lipidoid component.

[0257] A lipidoid compound, also simply referred to as lipidoid (or lipidoit), is a lipid-like compound, i.e. an amphiphilic compound with lipid-like physical properties. The lipidoid compound is preferably a compound which comprises two or more cationic nitrogen atoms and at least two lipophilic tails. In contrast to many conventional cationic lipids, the lipidoid compound may be free of a hydrolysable linking group, in particular linking groups comprising hydrolysable ester, amide or carbamate groups. The cationic nitrogen atoms of the lipidoid may be cationisable or permanently cationic, or both types of cationic nitrogens may be present in the compound. In the context of the present invention the term lipid is considered to also encompass lipidoid compounds.

[0258] In preferred embodiments the coding RNA of the composition for use is complexed or associated with a polymeric carrier, preferably with a polyethylene glycol/peptide polymer as defined above, and a lipidoid component.

[0259] As mentioned, the cationic lipidoid compound, also simply referred to as lipidoid, is a lipid-like compound, i.e. an amphiphilic compound with lipid-like physical properties.

[0260] In one embodiment, the lipidoid is a compound comprising at least two cationic nitrogen atoms and at least two lipophilic tails. As used herein, a “tail” is a substructure of a molecule representing a chain or chain-like structure, such as an optionally substituted hydrocarbyl, acyl or acyloxylalkyl chain of at least four, and more preferably at least six, carbon atoms. The optionally substituted hydrocarbyl, acyl or acyloxyalkyl chain representing the lipophilic tail may be directly connected with a cationic nitrogen atom.

[0261] In one specific embodiment, the lipidoid is a compound comprising two identical lipophilic tails, each of which is directly connected with a cationic nitrogen atom. In another specific embodiment, the lipidoid is a compound comprising three identical lipophilic tails, each tail being directly connected with a cationic nitrogen atom. In a further specific embodiment, the lipidoid is a compound comprising four or more identical lipophilic tails, each tail being directly connected with a cationic nitrogen atom. In each of these embodiments, the lipidoid may optionally comprise a further nitrogen atom to which no lipophilic tail is connected. Such lipidoid may also be understood as a compound having a cationic backbone derived from an oligoamine with the lipophilic tails being attached to the, or some of the, cationic nitrogens of the oligoamine.

[0262] If the lipophilic tails are substituted hydrocarbyl (e.g. alkyl) chains, the substituent may, e.g., be a methyl or a hydroxyl.

[0263] The optionally substituted hydrocarbyl chain may be saturated, such as to resemble an alkyl, or it may be unsaturated, i.e. an alkenyl or alkynyl, each optionally having one, two, three or more carbon-carbon double bonds and/or triple bonds. In the case of tail structures representing or including an acyl or acyloxyalkyl group, these may also comprise one, two or more carbon-carbon double bonds and/or triple bonds in the hydrocarbon segment of the tail.

[0264] In one embodiment, the lipidoid compound is free of hydrolysable linking groups, such as ester, amide or carbamate groups. As used herein, a linking group is a group which links the lipophilic tails of the lipidoid molecule to the hydrophilic region comprising the cationic nitrogen atoms. Conventional cationic lipids that have been proposed as carriers or agents to deliver nucleic acids to cells and enhance transfection often—if not typically—exhibit such linkers or linking groups, which are most often hydrolysable and/or enzymatically cleavable. In particular, linkers with ester groups have been proposed, but also linkers with amide groups or carbamate groups, all of which are susceptible to hydrolytic and/or enzymatic cleavage in vivo.

[0265] As used herein, hydrolysable means that an appreciable degree of hydrolysis occurs in a physiological fluid (such as interstitial fluid) under in vivo conditions within seconds, minutes, hours, or days; preferably, the respective compound or group is hydrolysed to at least 50% after not more than 7 days, or even after not more than 2 days.

[0266] In some embodiments of the inventions, the lipidoid compound comprises a PEG moiety.

[0267] As said, the lipidoid compound is cationic, which means that it is cationisable or permanently cationic. In one embodiment, the lipidoid is cationisable, i.e. it comprises one or more cationisable nitrogen atoms, but no permanently cationic nitrogen atoms. In another embodiment, at least one of the cationic nitrogen atoms of the lipidoid is permanently cationic. Optionally, the lipidoid comprises two permanently cationic nitrogen atoms, three permanently cationic nitrogen atoms, or even four or more permanently cationic nitrogen atoms.

[0268] In preferred embodiment the coding RNA of the composition for use is complexed or associated with a polymeric carrier, preferably with a polyethylene glycol/peptide polymer as defined above, and a lipidoid component, wherein the lipidoid component is a compound according to formula A

[chemical structure]

[0269] wherein
[0270] R_{A} is independently selected for each occurrence an unsubstituted, cyclic or acyclic, branched or unbranched C₁₋₂₀ aliphatic group; a substituted or unsubstituted, cyclic or acyclic, branched or unbranched C₁₋₂₀ heteroaliphatic group; a substituted or unsubstituted aryl; a substituted or unsubstituted heteroaryl;

[chemical structure]

[0271] wherein at least one R_{A} is

[chemical structure]

[0272] R₅ is independently selected for each occurrence of from an unsubstituted, cyclic or acyclic, branched or unbranched C₈₋₁₆ aliphatic; a substituted or unsubstituted aryl; or a substituted or unsubstituted heteroaryl;
[0273] each occurrence of x is an integer from 1 to 10;
[0274] each occurrence of y is an integer from 1 to 10;
[0275] or a pharmaceutically acceptable salt thereof.

[0276] In a preferred embodiment, the lipidoid component may be any one selected from the lipidoids of the lipidoids provided in the table of page 50-54 of published PCT patent application WO2017/212009A1, the specific lipidoids provided in said table, and the specific disclosure relating thereto herewith incorporated by reference.

[0277] Accordingly, in in a preferred embodiments, the lipidoid component may be any one selected from 3-C12-0H, 3-C12-OH-cat, 3-C12-amide, 3-C12-amide monomethyl, 3-C12-amide dimethyl, RevPEG(10)-3-C12-OH, RevPEG(10)-DLin-pAbenzoic, 3C12amide-TMA cat., 3C12amide-DMA, 3C12amide-NH2, 3C12amide-OH, 3C12Ester-OH, 3C12 Ester-amin, 3C12Ester-DMA, 2C12Amid-DMA, 3C12-lin-amid-DMA, 2C12-sperm-amid-DMA, or 3C12-sperm-amid-DMA (see table of published PCT patent application WO2017/212009A1 (pages 50-54).

[0278] In preferred embodiments, the peptide polymer comprising a lipidoid as specified above is used to complex the coding RNA of the composition for use to form complexes having an N/P ratio from about 0.1 to about 20, or from about 0.2 to about 15, or from about 2 to about 15, or from about 2 to about 12, wherein the N/P ratio is defined as the mole ratio of the nitrogen atoms of the basic groups of the cationic peptide or polymer to the phosphate groups of the nucleic acid. In that context, the disclosure of published PCT patent application WO2017/212009A1, in particular claims 1 to 10 of WO2017/212009A1, and the specific disclosure relating thereto is herewith incorporated by reference.

[0279] Further suitable lipidoid compounds may be derived from published PCT patent application WO2010/053572. In particular, lipidoid compounds derivable from claims 1 to 297 of published PCT patent application WO2010/053572 may be used in the context of the invention, e.g. incorporated into the peptide polymer as describer herein, or e.g. incorporated into the lipid nanoparticle (as described below). Accordingly, claims 1 to 297 of published PCT patent application WO2010053572, and the specific disclosure relating thereto, is herewith incorporated by reference.

[0280] In preferred embodiments, the at least one coding RNA of the composition for use is complexed, partially complexed, encapsulated, partially encapsulated, or associated with one or more lipids (e.g. cationic lipids and/or neutral lipids), thereby forming liposomes, lipid nanoparticles (LNPs), lipoplexes, and/or nanoliposomes.

[0281] The liposomes, lipid nanoparticles (LNPs), lipoplexes, and/or nanoliposomes—incorporated coding RNA may be completely or partially located in the interior space of the liposomes, lipid nanoparticles (LNPs), lipoplexes, and/or nanoliposomes, within the membrane, or associated with the exterior surface of the membrane. The incorporation of an RNA is also referred to herein as “encapsulation” wherein the coding RNA is entirely contained within the interior space of the liposomes, lipid nanoparticles (LNPs), lipoplexes, and/or nanoliposomes. The purpose of incorporating a coding RNA into liposomes, lipid nanoparticles (LNPs), lipoplexes, and/or nanoliposomes is to protect the RNA from an environment which may contain enzymes or chemicals that degrade RNA and/or systems or receptors that cause the rapid excretion of the RNA. Moreover, incorporating an RNA into liposomes, lipid nanoparticles (LNPs), lipoplexes, and/or nanoliposomes may promote the uptake of the RNA, and hence, may enhance the therapeutic effect of the RNA after SCS administration

[0282] In this context, the terms “complexed” or “associated” refer to the essentially stable combination of coding RNA as defined herein with one or more lipids into larger complexes or assemblies without covalent binding.

[0283] The term “lipid nanoparticle”, also referred to as “LNP”, is not restricted to any particular morphology, and include any morphology generated when a cationic lipid and optionally one or more further lipids are combined, e.g. in an aqueous environment and/or in the presence of RNA. E.g., a liposome, a lipid complex, a lipoplex and the like are within the scope of an LNP.

[0284] Liposomes, lipid nanoparticles (LNPs), lipoplexes, and/or nanoliposomes can be of different sizes such as, but not limited to, a multilamellar vesicle (MLV) which may be hundreds of nanometers in diameter and may contain a series of concentric bilayers separated by narrow aqueous compartments, a small unicellular vesicle (SUV) which may be smaller than 50 nm in diameter, and a large unilamellar vesicle (LUV) which may be between 50 nm and 500 nm in diameter.

[0285] LNPs of the invention are suitably characterized as microscopic vesicles having an interior aqua space sequestered from an outer medium by a membrane of one or more bilayers. Bilayer membranes of LNPs are typically formed by amphiphilic molecules, such as lipids of synthetic or natural origin that comprise spatially separated hydrophilic and hydrophobic domains. Bilayer membranes of the liposomes can also be formed by amphiphilic polymers and surfactants (e.g., polymerosomes, niosomes, etc.). In the context of the present invention, an LNP typically serves to transport the coding RNA of the composition for use to a target cell or tissue in the eye.

[0286] Accordingly, in preferred embodiments, the at least one coding RNA of the composition for use is complexed with one or more lipids thereby forming lipid nanoparticles (LNP).

[0287] LNPs typically comprise a cationic lipid and one or more excipient selected from neutral lipids, charged lipids, steroids and polymer conjugated lipids (e.g. PEGylated lipid). The at least one coding RNA may be encapsulated in the lipid portion of the LNP or an aqueous space enveloped by some or the entire lipid portion of the LNP. The at least one coding RNA or a portion thereof may also be associated and complexed with the LNP. An LNP may comprise any lipid capable of forming a particle to which the nucleic acids are attached, or in which the one or more nucleic acids are encapsulated. Preferably, the LNP comprising coding RNA comprises one or more cationic lipids, and one or more stabilizing lipids. Stabilizing lipids include neutral lipids and PEGylated lipids.

[0288] The cationic lipid of an LNP may be cationisable, i.e. it becomes protonated as the pH is lowered below the pK of the ionizable group of the lipid, but is progressively more neutral at higher pH values. At pH values below the pK, the lipid is then able to associate with negatively charged nucleic acids. In certain embodiments, the cationic lipid comprises a zwitterionic lipid that assumes a positive charge on pH decrease.

[0289] The LNP may comprise any further cationic or cationisable lipid, i.e. any of a number of lipid species which carry a net positive charge at a selective pH, such as physiological pH.

[0290] Such lipids include, but are not limited to, DSDMA, N,N-dioleyl-N,N-dimethylammonium chloride (DODAC), N,N-distearyl-N,N-dimethylammonium bromide (DDAB), 1,2-dioleoyltrimethyl ammonium propane chloride (DOTAP) (also known as N-(2,3-dioleoyloxy)propyl)-N,N,N-trimethylammonium chloride and 1,2-Dioleyloxy-3-trimethylaminopropane chloride salt), N-(1-(2,3-dioleyloxy)propyl)-N,N,N-trimethylammonium chloride (DOTMA), N,N-dimethyl-2,3-dioleyloxy)propylamine (DODMA), ckk-E12, ckk, 1,2-DiLinoleyloxy-N,N-dimethylaminopropane (DLinDMA), 1,2-Dilinolenyloxy-N,N-dimethylaminopropane (DLenDMA), 1,2-di-y-linolenyloxy-N,N-dimethylaminopropane (γ-DLenDMA), 98N12-5,1,2-Dilinoleylcarbamoyloxy-3-dimethylaminopropane (DLin-C-DAP), 1,2-Dilinoleyoxy-3-(dimethylamino)acetoxypropane (DLin-DAC), 1,2-Dilinoleyoxy-3-morpholinopropane (DLin-MA), 1,2-Dilinoleoyl-3-dimethylaminopropane (DLinDAP), 1,2-Dilinoleylthio-3-dimethylaminopropane (DLin-S-DMA), 1-Linoleoyl-2-linoleyloxy-3-dimethylaminopropane (DLin-2-DMAP), 1,2-Dilinoleyloxy-3-trimethylaminopropane chloride salt (DLin-TMA.Cl), ICE (Imidazol-based), HGT5000, HGT5001, DMDMA, CLinDMA, CpLinDMA, DMOBA, DOcarbDAP, DLincarbDAP, DLinCDAP, KLin-K-DMA, DLin-K-XTC2-DMA, XTC (2,2-Dilinoleyl-4-dimethylaminoethyl-[I,3]-dioxolane) HGT4003, 1,2-Dilinoleoyl-3-trimethylaminopropane chloride salt (DLin-TAP.Cl), 1,2-Dilinoleyloxy-3-(N-methylpiperazino)propane (DLin-MPZ), or 3-(N,N-Dilinoleylamino)-1,2-propanediol (DLinAP), 3-(N,N-Dioleylamino)-1,2-propanedio (DOAP), 1,2-Dilinoleyloxo-3-(2-N,N-dimethylamino)ethoxypropane (DLin-EG-DM A), 2,2-Dilinoleyl-4-dimethylaminomethyl-[1,3]-dioxolane (DLin-K-DMA) or analogs thereof, (3aR,5s,6aS)—N,N-dimethyl-2,2-di((9Z,12Z)-octadeca-9,12-dienyl)tetrahydro-3aH-cyclopenta[d][1,3]dioxol-5-amine, (6Z,9Z,28Z,31Z)-heptatriaconta-6,9,28,31-tetraen-19-yl-4-(dimethylamino)butanoate (MC3), ALNY-100 ((3aR,5s,6aS)—N,N-dimethyl-2,2-di((9Z,12Z)-octadeca-9,12-dienyl)tetrahydro-3aH-cyclopenta[d] [1,3]dioxol-5-amine)), 1,1′-(2-(4-(2-((2-(bis(2-hydroxydodecyl)amino)ethyl)(2-hydroxydodecyl)amino)ethyl)piperazin-1-yl)ethylazanediyl)didodecan-2-ol (C₁₂₋₂₀0), 2,2-dilinoleyl-4-(2-dimethylaminoethyl)-[1,3]-dioxolane (DLin-K-C2-DMA), 2,2-dilinoleyl-4-dimethylaminomethyl-[1,3]-dioxolane (DLin-K-DMA), NC98-5 (4,7,13-tris(3-oxo-3-(undecylamino)propyl)-NI,N 16-diundecyl-4,7,10,13-tetraazahexadecane-I,16-diamide), (6Z,9Z,28Z,31Z)-heptatriaconta-6,9,28,31-tetraen-19-yl 4-(dimethylamino) butanoate (DLin-M-C3-DMA), 3-((6Z,9Z,28Z,31Z)-heptatriaconta-6,9,28,31-tetraen-19-yloxy)-N,N-dimethylpropan-1-amine (MC3 Ether), 4-((6Z,9Z,28Z,31Z)-heptatriaconta-6,9,28,31-tetraen-19-yloxy)-N,N-dimethylbutan-1-amine (MC4 Ether), LIPOFECTIN® (commercially available cationic liposomes comprising DOTMA and 1,2-dioleoyl-sn-3phosphoethanolamine (DOPE), from GIBCO/BRL, Grand Island, N.Y.); LIPOFECTAMINE® (commercially available cationic liposomes comprising N-(1-(2,3dioleyloxy)propyl)-N-(2-(sperminecarboxamido)ethyl)-N,N-dimethylammonium trifluoroacetate (DOSPA) and (DOPE), from GIBCO/BRL); and TRANSFECTAM® (commercially available cationic lipids comprising dioctadecylamidoglycyl carboxyspermine (DOGS) in ethanol from Promega Corp., Madison, Wis.) or any combination of any of the foregoing. Further suitable cationic lipids for use in the compositions and methods of the invention include those described in international patent publications WO2010/053572 (and particularly, CI 2-200 described at paragraph [00225]) and WO2012/170930, both of which are incorporated herein by reference, HGT4003, HGT5000, HGTS001, HGT5001, HGT5002 (see US20150140070A1).

[0291] In some embodiments, the lipid is selected from the group consisting of 98N12-5, C12-200, and ckk-E12.

[0292] In one embodiment, the further cationic lipid is an amino lipid.

[0293] Representative amino lipids include, but are not limited to, 1,2-dilinoleyoxy-3-(dimethylamino)acetoxypropane (DLin-DAC), 1,2-dilinoleyoxy-3morpholinopropane (DLin-MA), 1,2-dilinoleoyl-3-dimethylaminopropane (DLinDAP), 1,2-dilinoleylthio-3-dimethylaminopropane (DLin-S-DMA), 1-linoleoyl-2-linoleyloxy-3dimethylaminopropane (DLin-2-DMAP), 1,2-dilinoleyloxy-3-trimethylaminopropane chloride salt (DLin-TMA.Cl), 1,2-dilinoleoyl-3-trimethylaminopropane chloride salt (DLin-TAP.Cl), 1,2-dilinoleyloxy-3-(N-methylpiperazino)propane (DLin-MPZ), 3-(N,Ndilinoleylamino)-1,2-propanediol (DLinAP), 3-(N,N-dioleylamino)-1,2-propanediol (DOAP), 1,2-dilinoleyloxo-3-(2-N,N-dimethylamino)ethoxypropane (DLin-EG-DMA), and 2,2-dilinoleyl-4-dimethylaminomethyl-[1,3]-dioxolane (DLin-K-DMA), 2,2-dilinoleyl-4-(2-dimethylaminoethyl)-[I,3]-dioxolane (DLin-KC2-DMA); dilinoleyl-methyl-4-dimethylaminobutyrate (DLin-MC3-DMA); MC3 (US20100324120).

[0294] In one embodiment, the at least one RNA may be formulated in an aminoalcohol lipidoid. Aminoalcohol lipidoids which may be used in the present invention may be prepared by the methods described in U.S. Pat. No. 8,450,298, herein incorporated by reference in its entirety. Suitable (ionizable) lipids can also be the compounds as disclosed in Tables 1, 2 and 3 and as defined in claims 1-24 of published PCT patent application WO2017/075531A1, the specific disclosure hereby incorporated by reference.

[0295] In another embodiment, ionizable lipids can also be the compounds as disclosed in published PCT patent application WO2015/074085A1 (i.e. ATX-001 to ATX-032 or the compounds as specified in claims 1-26), U.S. Appl. Nos. 61/905,724 and Ser. No. 15/614,499 or U.S. Pat. Nos. 9,593,077 and 9,567,296, the specific disclosure hereby incorporated by reference.

[0296] In that context, any lipid derived from generic formula (X1)

[chemical structure]

[0297] wherein, Ri and R2 are the same or different, each a linear or branched alkyl consisting of 1 to 9 carbons, an alkenyl or alkynyl consisting of 2 to 11carbons, Li and L2 are the same or different, each a linear alkylene or alkenylene consisting of 5 to 18 carbons, or forming a heterocycle with N, Xi is a bond, or is —CO—O— whereby -L2-CO—O—R² is formed, X2 is S or O, L3 is a bond or a linear or branched alkylene consisting of 1 to 6 carbons, or forming a heterocycle with N, R3 is a linear or branched alkylene consisting of 1 to 6 carbons, and R4 and R 5 are the same or different, each hydrogen or a linear or branched alkyl consisting of 1 to 6 carbons; or a pharmaceutically acceptable salt thereof may be suitably used.

[0298] In other embodiments, suitable cationic lipids can also be the compounds as disclosed in published PCT patent application WO2017/117530A1 (i.e. lipids 13, 14, 15, 16, 17, 18, 19, 20, or the compounds as specified in the claims), the specific disclosure hereby incorporated by reference.

[0299] In that context, any lipid derived from generic formula (X2)

[chemical structure]

[0300] wherein

[0301] X is a linear or branched alkylene or alkenylene, monocyclic, bicyclic, or tricyclic arene or heteroarene;

[0302] Y is a bond, an ethene, or an unsubstituted or substituted aromatic or heteroaromatic ring; Z is S or 0;

[0303] L is a linear or branched alkylene of 1 to 6 carbons;

[0304] R-3 and R4 are independently a linear or branched alkyl of 1 to 6 carbons;

[0305] Ri and R2 are independently a linear or branched alkyl or alkenyl of 1 to 20 carbons; r is 0 to 6; and

[0306] m, n, p, and q are independently 1 to 18;

[0307] wherein when n=q, m=p, and Ri=R2, then X and Y differ;

[0308] wherein when X=Y, n=q, m=p, then Ri and R2 differ;

[0309] wherein when X=Y, n=q, and Ri=R2, then m and p differ; and

[0310] wherein when X=Y, m=p, and Ri=R2, then n and q differ;

[0311] or a pharmaceutically acceptable salt thereof.

[0312] In preferred embodiments, a lipid may be used derived from formula (X2), wherein, X is a bond, linear or branched alkylene, alkenylene, or monocyclic, bicyclic, or tricyclic arene or heteroarene; Y is a monocyclic, bicyclic, or tricyclic arene or heteroarene; Z is S or O; L is a linear or branched alkylene of 1 to 6 carbons; R3 and R4 are independently a linear or branched alkyl of 1 to 6 carbons; Ri and R2 are independently a linear or branched alkyl or alkenyl of 1 to 20 carbons; r is 0 to 6; and m, n, p, and q are independently 1 to 18; or a pharmaceutically acceptable salt thereof may be suitably used.

[0313] In preferred embodiments, ionizable lipids may also be selected from the lipids disclosed in published PCT patent application WO2018/078053A1 (i.e. lipids derived form formula I, II, and III of WO2018078053A1, or lipids as specified in Claims 1 to 12 of WO2018/078053A1), the specific disclosure of WO2018/078053A1 relating thereto hereby incorporated by reference. In that context, lipids disclosed in Table 7 of WO2018/078053A1 (e.g. lipids derived from formula I-1 to I-41) and lipids disclosed in Table 8 of WO20181078053A1 (e.g. lipids derived from formula II-1 to II-36) may be suitably used in the context of the invention. Accordingly, formula I-1 to formula I-41 and formula II-1 to formula II-36 of WO2018/078053A1, and the specific disclosure relating thereto, are herewith incorporated by reference.

[0314] In particularly preferred embodiments, the at least one coding RNA of the composition for use is complexed with one or more lipids thereby forming LNPs, wherein the cationic lipid of the LNP is selected from structures III-1 to III-36 of Table 9 of published PCT patent application WO2018/078053A1. Accordingly, formula III-1 to III-36 of WO2018/078053A1, and the specific disclosure relating thereto, are herewith incorporated by reference.

[0315] In particularly preferred embodiment, the at least one coding RNA of the composition is complexed with one or more lipids thereby forming LNPs, wherein the LNP comprises the following cationic lipid:

[chemical structure]

[0316] In certain embodiments, the cationic lipid is present in the LNP in an amount from about 30 to about 95 mole percent, relative to the total lipid content of the LNP. If more than one cationic lipid is incorporated within the LNP, such percentages apply to the combined cationic lipids.

[0317] In one embodiment, the cationic lipid is present in the LNP in an amount from about 30 to about 70 mole percent. In one embodiment, the cationic lipid is present in the LNP in an amount from about 40 to about 60 mole percent, such as about 40, 41, 42, 43, 44, 45, 46, 47, 48, 49, 50, 51, 52, 53, 54, 55, 56, 57, 58, 59 or 60 mole percent, respectively.

[0318] In embodiments, the cationic lipid is present in the LNP in an amount from about 47 to about 48 mole percent, such as about 47.0, 47.1, 47.2, 47.3, 47.4, 47.5, 47.6, 47.7, 47.8, 47.9, 50.0 mole percent, respectively, wherein 47.7 mole percent are particularly preferred.

[0319] In some embodiments, the cationic lipid is present in a ratio of from about 20 mol % to about 70 or 75 mol % or from about 45 to about 65 mol % or about 20, 25, 30, 35, 40, 45, 50, 55, 60, 65, or about 70 mol % of the total lipid present in the LNP. In further embodiments, the LNPs comprise from about 25% to about 75% on a molar basis of cationic lipid, e.g., from about 20 to about 70%, from about 35 to about 65%, from about 45 to about 65%, about 60%, about 57.5%, about 57.1%, about 50% or about 40% on a molar basis (based upon 100% total moles of lipid in the LNP). In some embodiments, the ratio of cationic lipid to RNA is from about 3 to about 15, such as from about 5 to about 13 or from about 7 to about 11.

[0320] In some embodiments of the invention the LNP comprises a combination or mixture of any the lipids described above.

[0321] Other suitable (cationic or ionizable) lipids are disclosed in published patent applications WO20091086558, WO2009/127060, WO2010/048536, WO2010/054406, WO2010/088537, WO2010/129709, WO2011/153493, WO 2013/063468, US2011/0256175, US2012/0128760, US2012/0027803, U.S. Pat. No. 8,158,601, WO2016/118724, WO2016/118725, WO2017/070613, WO2017/070620, WO2017/099823, WO2012/040184, WO2011/153120, WO2011/149733, WO2011/090965, WO2011/043913, WO2011/022460, WO2012/061259, WO2012/054365, WO2012/044638, WO2010/080724, WO2010/21865, WO2008/103276, WO2013/086373, WO2013/086354, and U.S. Pat. Nos. 7,893,302, 7,404,969, 8,283,333, 8,466,122 and 8,569,256 and US Patent Publication No. US2010/0036115, US2012/0202871, US2013/0064894, US2013/0129785, US2013/0150625, US20130178541, US2013/0225836, US2014/0039032 and WO2017/112865. In that context, the disclosures of WO2009/086558, WO2009/127060, WO2010/048536, WO2010/054406, WO2010/088537, WO2010/129709, WO2011/153493, WO 2013/063468, US2011/0256175, US2012/0128760, US2012/0027803, U.S. Pat. No. 8,158,601, WO2016/118724, WO2016/118725, WO2017/070613, WO2017/070620, WO2017/099823, WO2012/040184, WO2011/153120, WO2011/149733, WO2011/090965, WO2011/043913, WO2011/022460, WO2012/061259, WO2012/054365, WO2012/044638, WO2010/080724, WO2010/21865, WO2008/103276, WO2013/086373, WO2013/086354, U.S. Pat. Nos. 7,893,302, 7,404,969, 8,283,333, 8,466,122 and 8,569,256 and US Patent Publication No. US2010/0036115, US2012/0202871, US2013/0064894, US2013/0129785, US2013/0150625, US20130178541, US2013/0225836 and US2014/0039032 and WO2017/112865 specifically relating to (cationic) lipids suitable for LNPs are incorporated herewith by reference.

[0322] In some embodiments, amino or cationic lipids as defined herein have at least one protonatable or deprotonatable group, such that the lipid is positively charged at a pH at or below physiological pH (e.g. pH 7.4), and neutral at a second pH, preferably at or above physiological pH. It will, of course, be understood that the addition or removal of protons as a function of pH is an equilibrium process, and that the reference to a charged or a neutral lipid refers to the nature of the predominant species and does not require that all of lipids have to be present in the charged or neutral form. Lipids having more than one protonatable or deprotonatable group, or which are zwitterionic, are not excluded and may likewise suitable in the context of the present invention.

[0323] In some embodiments, the protonatable lipids have a pKa of the protonatable group in the range of about 4 to about 11, e.g., a pKa of about 5 to about 7.

[0324] LNPs can comprise two or more (different) cationic lipids. The cationic lipids may be selected to contribute different advantageous properties. E.g., cationic lipids that differ in properties such as amine pKa, chemical stability, half-life in circulation, half-life in tissue, net accumulation in tissue, or toxicity can be used in the LNP. In particular, the cationic lipids can be chosen so that the properties of the mixed-LNP are more desirable than the properties of a single-LNP of individual lipids.

[0325] The amount of the permanently cationic lipid or lipidoid may be selected taking the amount of the nucleic acid cargo into account. In one embodiment, these amounts are selected such as to result in an N/P ratio of the nanoparticle(s) or of the composition in the range from about 0.1 to about 20. In this context, the N/P ratio is defined as the mole ratio of the nitrogen atoms (“N”) of the basic nitrogen-containing groups of the lipid or lipidoid to the phosphate groups (“P”) of the RNA which is used as cargo. The N/P ratio may be calculated on the basis that e.g. 1 μg RNA typically contains about 3nmol phosphate residues, provided that the RNA exhibits a statistical distribution of bases. The “N”-value of the lipid or lipidoid may be calculated on the basis of its molecular weight and the relative content of permanently cationic and—if present—cationisable groups.

[0326] LNP in vivo characteristics and behavior can be modified by addition of a hydrophilic polymer coating, e.g. polyethylene glycol (PEG), to the LNP surface to confer steric stabilization. Furthermore, LNPs can be used for specific targeting by attaching ligands (e.g. antibodies, peptides, and carbohydrates) to its surface or to the terminal end of the attached PEG chains (e.g. via PEGylated lipids or PEGylated cholesterol).

[0327] In some embodiments, the LNPs comprise a polymer conjugated lipid. The term “polymer conjugated lipid” refers to a molecule comprising both a lipid portion and a polymer portion. An example of a polymer conjugated lipid is a PEGylated lipid. The term “PEGylated lipid” refers to a molecule comprising both a lipid portion and a polyethylene glycol portion. PEGylated lipids are known in the art and include 1-(monomethoxy-polyethyleneglycol)-2,3-dimyristoylglycerol (PEG-s-DMG) and the like.

[0328] In certain embodiments, the LNP comprises an additional, stabilizing-lipid which is a polyethylene glycol-lipid (PEGylated lipid). Suitable polyethylene glycol-lipids include PEG-modified phosphatidylethanolamine, PEG-modified phosphatidic acid, PEG-modified ceramides (e.g. PEG-CerC14 or PEG-CerC20), PEG-modified dialkylamines, PEG-modified diacylglycerols, PEG-modified dialkylglycerols. Representative polyethylene glycol-lipids include PEG-c-DOMG, PEG-c-DMA, PEG-s-DMG, PEG-DMG, PEG-DSG, PEG-DSPE, PEG-DOMG. In one embodiment, the polyethylene glycol-lipid is N-[(methoxy poly(ethylene glycol)2000)carbamyl]-1,2-dimyristyloxlpropyl-3-amine (PEG-c-DMA). In a preferred embodiment, the polyethylene glycol-lipid is PEG-2000-DMG. In one embodiment, the polyethylene glycol-lipid is PEG-c-DOMG). In other embodiments, the LNPs comprise a PEGylated diacylglycerol (PEG-DAG) such as 1-(monomethoxy-polyethyleneglycol)-2,3-dimyristoylglycerol (PEG-DMG), a PEGylated phosphatidylethanoloamine (PEG-PE), a PEG succinate diacylglycerol (PEG-S-DAG) such as 4-O-(2′,3′-di(tetradecanoyloxy)propyl-1-O-(ω-methoxy(polyethoxy)ethyl)butanedioate (PEG-S-DMG), a PEGylated ceramide (PEG-cer), or a PEG dialkoxypropylcarbamate such as w-methoxy(polyethoxy)ethyl-N-(2,3di(tetradecanoxy)propyl)carbamate or 2,3-di(tetradecanoxy)propyl-N-(ω-methoxy(polyethoxy)ethyl)carbamate.

[0329] In preferred embodiments the at least one coding RNA of the composition for use is complexed with one or more lipids thereby forming LNPs, wherein the LNP additionally comprises a PEGylated lipid that is preferably derived from formula (IV) of published PCT patent application WO2018/078053A1. Accordingly, PEGylated lipid derived from formula (IV) of published PCT patent application WO2018/078053A1, and the respective disclosure relating thereto, is herewith incorporated by reference.

[0330] In a particularly preferred embodiments, the at least one coding RNA of the composition for use is complexed with one or more lipids thereby forming LNPs, wherein the LNP additionally comprises a PEGylated lipid, wherein the PEG lipid is preferably derived from formula (IVa) of published PCT patent application WO2018/078053A1. Accordingly, PEGylated lipid derived from formula (IVa) of published PCT patent application WO2018/078053A1, and the respective disclosure relating thereto, is herewith incorporated by reference.

[0331] In a particularly preferred embodiment the PEG lipid is of formula (IVa)

[chemical structure]

[0332] wherein n has a mean value ranging from 30 to 60, such as about 30±2, 32±2, 34±2, 36±2, 38±2, 40±2, 42±2, 44±2, 46±2, 48±2, 50±2, 52±2, 54±2, 56±2, 58±2, or 60±2. In a most preferred embodiment n is about 49.

[0333] Further examples of PEG-lipids suitable in that context are provided in US2015/0376115A1 and WO2015/199952, each of which is incorporated by reference in its entirety.

[0334] In some embodiments, LNPs include less than about 3, 2, or 1 mole percent of PEG or PEG-modified lipid, based on the total moles of lipid in the LNP. In further embodiments, LNPs comprise from about 0.1% to about 20% of the PEG-modified lipid on a molar basis, e.g., about 0.5 to about 10%, about 0.5 to about 5%, about 10%, about 5%, about 3.5%, about 3%, about 2,5%, about 2%, about 1.5%, about 1%, about 0.5%, or about 0.3% on a molar basis (based on 100% total moles of lipids in the LNP). In preferred embodiments, LNPs comprise from about 1.0% to about 2.0% of the PEG-modified lipid on a molar basis, e.g., about 1.2 to about 1.9%, about 1.2 to about 1.8%, about 1.3 to about 1.8%, about 1.4 to about 1.8%, about 1.5 to about 1.8%, about 1.6 to about 1.8%, in particular about 1.4%, about 1.5%, about 1.6%, about 1.7%, about 1.8%, about 1.9%, most preferably 1.7% (based on 100% total moles of lipids in the LNP). In various embodiments, the molar ratio of the cationic lipid to the PEGylated lipid ranges from about 100:1 to about 25:1.

[0335] In preferred embodiments, the LNP additionally comprises one or more additional lipids which stabilize the formation of particles during their formation (e.g. neutral lipid and/or one or more steroid or steroid analogue).

[0336] In preferred embodiments, the coding RNA of the composition for use is complexed with one or more lipids thereby forming LNPs, wherein the LNP additionally comprises one or more neutral lipid and/or one or more steroid or steroid analogue.

[0337] Suitable stabilizing lipids include neutral lipids and anionic lipids. The term “neutral lipid” refers to any one of a number of lipid species that exist in either an uncharged or neutral zwitterionic form at physiological pH. Representative neutral lipids include diacylphosphatidylcholines, diacylphosphatidylethanolamines, ceramides, sphingomyelins, dihydro sphingomyelins, cephalins, and cerebrosides.

[0338] In embodiments, the LNP additionally comprises one or more neutral lipids, wherein the neutral lipid is selected from the group comprising distearoylphosphatidylcholine (DSPC), dioleoylphosphatidylcholine (DOPC), dipalmitoylphosphatidylcholine (DPPC), dioleoylphosphatidylglycerol (DOPG), dipalmitoylphosphatidylglycerol (DPPG), dioleoyl-phosphatidylethanolamine (DOPE), palmitoyloleoylphosphatidylcholine (POPC), palmitoyloleoyl-phosphatidylethanolamine (POPE) and dioleoyl-phosphatidylethanolamine 4-(N-maleimidomethyl)-cyclohexane-1carboxylate (DOPE-mal), dipalmitoyl phosphatidyl ethanolamine (DPPE), dimyristoylphosphoethanolamine (DMPE), distearoyl-phosphatidylethanolamine (DSPE), 16-O-monomethyl PE, 16-O-dimethyl PE, 18-1-trans PE, 1-stearioyl-2-oleoylphosphatidyethanol amine (SOPE), and 1,2-dielaidoyl-sn-glycero-3-phophoethanolamine (transDOPE), or mixtures thereof.

[0339] In some embodiments, the LNPs comprise a neutral lipid selected from DSPC, DPPC, DMPC, DOPC, POPC, DOPE and SM. In various embodiments, the molar ratio of the cationic lipid to the neutral lipid ranges from about 2:1 to about 8:1. In preferred embodiments, the neutral lipid is 1,2-distearoyl-sn-glycero-3-phosphocholine (DSPC). The molar ratio of the cationic lipid to DSPC may be in the range from about 2:1 to 8:1. In preferred embodiments, the steroid is cholesterol. The molar ratio of the cationic lipid to cholesterol may be in the range from about 2:1 to 1:1. In some embodiments, the cholesterol may be PEGylated.

[0340] The sterol can be about 10 mol % to about 60 mol % or about 25 mol % to about 40 mol % of the lipid particle. In one embodiment, the sterol is about 10, 15, 20, 25, 30, 35, 40, 45, 50, 55, or about 60 mol % of the total lipid present in the lipid particle. In another embodiment, the LNPs include from about 5% to about 50% on a molar basis of the sterol, e.g., about 15% to about 45%, about 20% to about 40%, about 48%, about 40%, about 38.5%, about 35%, about 34.4%, about 31.5% or about 31% on a molar basis (based upon 100% total moles of lipid in the LNP).

[0341] Preferably, LNPs comprise: (a) at least one coding RNA, (b) a cationic lipid, (c) an aggregation reducing agent or aggregation-reducing lipid (such as polyethylene glycol (PEG) lipid or PEG-modified lipid), (d) optionally a non-cationic lipid (such as a neutral lipid), and (e) optionally, a sterol.

[0342] In some embodiments, the cationic lipids (as defined above), non-cationic lipids (as defined above), cholesterol (as defined above), and/or PEG-modified lipids (as defined above) may be combined at various relative molar ratios. E.g., the ratio of cationic lipid to non-cationic lipid to cholesterol-based lipid to PEGylated lipid may be between about 30-60:20-35:20-30:1-15, or at a ratio of about 40:30:25:5, 50:25:20:5, 50:27:20:3, 40:30:20:10, 40:32:20:8, 40:32:25:3 or 40:33:25:2, or at a ratio of about 50:25:20:5, 50:20:25:5, 50:27:20:3 40:30:20: 10,40:30:25:5 or 40:32:20:8,40:32:25:3 or 40:33:25:2, respectively.

[0343] In particularly preferred embodiments, the lipid is lipid compound 111-3, the neutral lipid is DSPC, the steroid is cholesterol, and the PEGylated lipid is the compound of formula (IVa).

[0344] In a preferred embodiments, wherein the the liposomes, lipid nanoparticles, lipoplexes, and/or nanoliposomes preferably consist of (i) at least one cationic lipid; (ii) at least one neutral lipid; (iii) at least one steroid or steroid analogue; and (iv) at least one aggregation reducing-lipid, wherein, preferably, (i) to (iv) are in a molar ratio of about 20-60% cationic lipid, 5-25% neutral lipid, 25-55% sterol, and 0.5-15% PEG-lipid.

[0345] In particularly preferred embodiments, the at least one coding RNA of the composition for use is complexed with one or more lipids thereby forming LNPs, wherein the LNP essentially consists of

[0346] (i) at least one cationic lipid as defined herein, preferably lipid 111-3;

[0347] (ii) a neutral lipid as defined herein, preferably 1,2-distearoyl-sn-glycero-3-phosphocholine (DSPC);

[0348] (iii) a steroid or steroid analogue as defined herein, preferably cholesterol; and

[0349] (iv) a PEG-lipid as defined herein, e.g. PEG-DMG or PEG-cDMA, preferably a PEGylated lipid of formula (IVa),

[0350] wherein (i) to (iv) are in a molar ratio of about 20-60% cationic lipid: 5-25% neutral lipid: 25-55% sterol; 0.5-15% PEG-lipid.

[0351] In a particular preferred embodiment, the at least one coding RNA of the composition for use is complexed with one or more lipids thereby forming LNPs, wherein LNPs have a molar ratio of approximately 50:10:38.5:1.5, preferably 47.5:10:40.8:1.7 or more preferably 47.4:10:40.9:1.7 (i.e. proportion (mol %) of cationic lipid (preferably lipid 111-3), DSPC, cholesterol and PEG-lipid ((preferably PEG-lipid of formula (IVa) with n=49); solubilized in ethanol).

[0352] The total amount of coding RNA in the LNPs may vary and is defined depending on the e.g. RNA to total lipid w/w ratio. In one embodiment of the invention the RNA to total lipid ratio is less than 0.06 w/w, preferably between 0.03 w/w and 0.04 w/w.

[0353] In various embodiments, the LNP as defined herein have a mean diameter of from about 50 nm to about 200 nm, from about 60 nm to about 200 nm, from about 70 nm to about 200 nm, from about 80 nm to about 200 nm, from about 90 nm to about 200 nm, from about 90 nm to about 190 nm, from about 90 nm to about 180 nm, from about 90 nm to about 170 nm, from about 90 nm to about 160 nm, from about 90 nm to about 150 nm, from about 90 nm to about 140 nm, from about 90 nm to about 130 nm, from about 90 nm to about 120 nm, from about 90 nm to about 100 nm, from about 70 nm to about 90 nm, from about 80 nm to about 90 nm, from about 70 nm to about 80 nm, or about 30 nm, 35 nm, 40 nm, 45 nm, 50 nm, 55 nm, 60 nm, 65 nm, 70 nm, 75 nm, 80 nm, 85 nm, 90 nm, 95 nm, 100 nm, 105 nm, 110 nm, 115 nm, 120 nm, 125 nm, 130 nm, 135 nm, 140 nm, 145 nm, 150 nm, 160 nm, 170 nm, 180 nm, 190 nm, or 200 nm and are substantially non-toxic. As used herein, the mean diameter may be represented by the z-average as determined by dynamic light scattering as commonly known in the art.

[0354] The polydispersity index (PDI) of the nanoparticles is typically in the range of 0.1 to 0.5. In a particular embodiment, a PDI is below 0.2. Typically, the PDI is determined by dynamic light scattering as commonly known in the art.

[0355] In another preferred embodiment of the invention the lipid nanoparticles have a hydrodynamic diameter in the range from about 50 nm to about 300 nm, or from about 60 nm to about 250 nm, from about 60 nm to about 150 nm, or from about 60 nm to about 120 nm, respectively.

[0356] According to various suitable embodiments, suitable carriers for SCS delivery may include polymer based carriers, such as polyethyleneimine (PEI), lipid nanoparticles and liposomes, nanoliposomes, ceramide-containing nanoliposomes, proteoliposomes, both natural and synthetically-derived exosomes, natural, synthetic and semisynthetic lamellar bodies, nanoparticulates, calcium phosphor-silicate nanoparticulates, calcium phosphate nanoparticulates, silicon dioxide nanoparticulates, nanocrystalline particulates, semiconductor nanoparticulates, poly(D-arginine), sol-gels, nanodendrimers, starch-based delivery systems, micelles, emulsions, niosomes, multi-domain-block polymers (vinyl polymers, polypropyl acrylic acid polymers, dynamic poly conjugates).

[0357] In other embodiments, the at least one coding RNA of the composition for use may be formulated in amphiphilic macromolecules (AMs). AMs comprise biocompatible amphiphilic polymers which have an alkylated sugar backbone covalently linked to poly(ethylene glycol). In aqueous solution, the AMs self-assemble to form micelles. Non-limiting examples of methods of forming AMs and AMs are described in US Patent Publication No. US20130217753, the contents of which are herein incorporated by reference in its entirety.

[0358] In other embodiments, the at least one coding RNA of the composition for use may be formulated in inorganic nanoparticles (U.S. Pat. No. 8,257,745, herein incorporated by reference in its entirety). The inorganic nanoparticles may include, but are not limited to, clay substances that are water swellable. As a non-limiting example, the inorganic nanoparticle may include synthetic smectite clays which are made from simple silicates (See e.g., U.S. Pat. Nos. 5,585,108 and 8,257,745 each of which are herein incorporated by reference in their entirety).

[0359] In other embodiments, the at least one coding RNA of the composition for use may be formulated in water-dispersible nanoparticle comprising a semiconductive or metallic material (U.S. Pub. No. 20120228565; herein incorporated by reference in its entirety) or formed in a magnetic nanoparticle (U.S. Pub. No. 20120265001 and 20120283503; each of which is herein incorporated by reference in its entirety). The water-dispersible nanoparticles may be hydrophobic nanoparticles or hydrophilic nanoparticles.

[0360] In other embodiments, the at least one coding RNA of the composition for use may be formulated in high density lipoprotein-nucleic acid particles. As a non-limiting example, the particles may comprise a nucleic acid component and a polypeptide comprising a positively charged region which associates with the nucleic acid component as described in U.S. Pat. No. 8,734,853, the contents of which is herein incorporated by reference in its entirety.

[0361] In other embodiments, the at least one coding RNA of the composition for use may be formulated in a micelle or coated on a micelle for delivery, or may be encapsulated into any hydrogel known in the art which may form a gel when injected into a subject, or may be formulated in and/or delivered using a nanolipogel.

[0362] In other embodiments, the at least one coding RNA of the composition for use may be formulated in exosomes. The exosomes may be loaded with at least one polynucleotide and delivered to cells, tissues and/or organisms. As a non-limiting example, the RNA may be loaded in the exosomes described in International Publication No. WO2013084000, herein incorporated by reference in its entirety. In embodiments, the exosome are obtained from cells that have been induced to undergo oxidative stress such as, but not limited to, the exosomes described in International Patent Publication No. WO2014028763, the contents of which are herein incorporated by reference in its entirety.

[0363] Accordingly, in preferred embodiments, the at least one coding RNA of the composition for use is complexed or associated with or at least partially complexed or partially associated with one or more exosomes.

[0364] Accordingly, the pharmaceutically acceptable carrier as used herein preferably includes the liquid or non-liquid basis of the inventive composition. If the inventive composition is provided in liquid form, the carrier will be water, typically pyrogen-free water; isotonic saline or buffered (aqueous) solutions, e.g. phosphate, citrate etc. buffered solutions. Preferably, Ringer- or Ringer-Lactate solution as described in WO2006/122828 is used as a liquid basis for the composition for use according to the invention.

[0365] Accordingly, in preferred embodiments, the composition for use is administered in Ringer- or Ringer-Lactate solution.

[0366] In embodiments, the composition for use may be provided in lyophilized or dried form (using e.g. lyophilisation or drying methods as described in WO2016/165831, WO2011/069586, WO2016/184575 or WO2016/184576). Preferably, the lyophilized or dried composition is reconstituted in a suitable buffer, advantageously based on an aqueous carrier, prior to SCS administration, e.g. Ringer- or Ringer-Lactate solution or a phosphate buffer solution.

[0367] In preferred embodiments, the composition for use as specified herein is administered into the SCS, wherein administration into the SCS may be performed by an injection needle, a microneedle, an injection device, a catheter, an implant delivery device, or a microcannula to a subject in need of treatment. Preferably, administration into the SCS is performed by a microinjection device.

[0368] Preferably, the injection needle or microneedle has a length that does not exceed about 2000 μm and a diameter that does not exceed about 600 μm.

[0369] A suitable injection device for SCS administration is an SCS microinjection device. Such a microinjection device is for example described in published PCT patent application WO2014/074823, the whole disclosure incorporated herein by reference. In particular, the features of Claims 1 to 32 of WO2014/074823, as well as the disclosure relating thereto, are particularly suitable in the context of the invention, and are herein incorporated by reference. Another suitable microinjection device for SCS delivery is described in published PCT patent application WO2017/192565, the whole disclosure incorporated herein by reference. In particular, the features of Claims 1 to 44 of WO2017/192565, or the device as shown in FIGS. 5 to 41 of WO2017/192565, as well as the specific disclosure relating to these claims and Figures, are particularly suitable in the context of the invention, and are herein incorporated by reference.

[0370] Further suitable delivery devices for SCS administration are described in published PCT patent application WO2014151070A1, the whole disclosure incorporated herein by reference. In particular, the features of Claims 1 to 24 of WO2014151070A1, as well as the disclosure relating thereto, are particularly suitable in the context of the invention, and are herein incorporated by reference. A further suitable delivery device for SCS administration are described in published PCT patent application WO2017158365, the whole disclosure incorporated herein by reference. In particular, the features of Claims 1-38 of WO2017158365, as well as the disclosure relating thereto, are particularly suitable in the context of the invention, and are herein incorporated by reference. A further suitable delivery device for SCS administration are described in published PCT patent application WO2017046358, the whole disclosure incorporated herein by reference. In particular, the features of Claims 1-16 of WO2017046358, as well as the disclosure relating thereto, are particularly suitable in the context of the invention, and are herein incorporated by reference. A further suitable delivery device for SCS administration are described in published PCT patent application WO2016042162, the whole disclosure incorporated herein by reference. In particular, the features of Claims 1 to 29 of WO2016042162, as well as the disclosure relating thereto, are particularly suitable in the context of the invention, and are herein incorporated by reference.

[0371] In a preferred embodiment, the effective amount of the composition for use when administered to the SCS as described above provides higher efficacy or expression or a greater therapeutic effect compared to the identical amount of coding RNA when administered via state of the art methods including intravitreally, intracamerally, topically, subretinally, parenterally, or orally.

[0372] Methods to evaluate the expression of the coding RNA in the eye or in specific organs/tissues of the eye, and methods to determine the therapeutic effect (neovascularization, subretinal exudation, inflammation etc.) of a treatment are well known in the art for the skilled artisan. In embodiments, the intraocular pressure of the eye remains substantially constant during administration of the composition to the SCS. In another embodiment, administration of the composition as defined herein to the SCS results in a decreased number of side effects, or a reduced severity of one or more side effects, compared to administration of the same composition intravitreally or subretinally.

[0373] Kit or Kit of Parts

[0374] In a second aspect, the present invention provides a kit or kit of parts, preferably a kit or kit of parts for use in treatment or prevention of an ophthalmic disease, disorder or condition, wherein said kit or kit of parts is administered into the SCS to a subject in need of treatment.

[0375] Notably, embodiments relating to the first aspect of the invention are likewise applicable to embodiments of the second aspect of the invention, and embodiments relating to the second aspect of the invention are likewise applicable to embodiments of the first aspect of the invention.

[0376] The kit or kit of parts for use may comprise at least one coding RNA as defined in the context of the first aspect, and/or the composition of the first aspect, and optionally, a liquid vehicle for solubilising, and optionally technical instructions providing information on administration and dosage of the components. Embodiments and features disclosed in the context of coding RNA suitable for ocular delivery or embodiments and features disclosed in the context of the composition for use (e.g., LNP formulation, delivery devices) are likewise applicable for the RNA and/or the composition of the kit or the kit of parts.

[0377] The kit or kit of parts for use may further comprise additional components as described in the context of the composition, in particular, pharmaceutically acceptable carriers, excipients, buffers and the like.

[0378] The kit or kit of parts for use may further comprise an anti-inflammatory drug, a vascular endothelial growth factor (VEGF) modulator, a platelet derived growth factor (PDGF) modulator, an angiogenesis inhibitor, an immunosuppressive agent, a vascular permeability inhibitor, or a combination thereof, to the SCS of the patient in need of treatment. Further, the kit or kit of parts for use may comprise modulators and/or activators of any of the provided protein targets of List 1. In other embodiments, the kit or kit of parts for use may comprise at least one of the agents provided in paragraph [1263] to [1276] of published PCT application WO2017/192565.

[0379] The technical instructions of said kit or kit of parts for use may comprise information about administration and dosage and patient groups. Such kits, preferably kits of parts, may be applied e.g. for any of the applications or medical uses mentioned herein.

[0380] Preferably, the individual components of the kit or kit of parts for use may be provided in lyophilised form. The kit may further contain as a part a vehicle (e.g. pharmaceutically acceptable buffer solution) for solubilising the coding RNA or the composition of the first aspect.

[0381] In preferred embodiments, the kit or kit of parts for use comprises Ringer- or Ringer lactate solution.

[0382] In preferred embodiments, the kit or kit of parts for may comprise an injection needle suitable for SCS delivery, a microneedle suitable for SCS delivery, an injection device suitable for SCS delivery, a catheter suitable for SCS delivery, an implant delivery device suitable for SCS delivery, or a microcannula suitable for SCS delivery.

[0383] Any of the above kits may be used in applications or medical uses as defined in the context of the invention.

[0384] Methods of Treatment and Delivery: In a third aspect, the present invention relates to a method of treating or preventing an ophthalmic disease, disorder, or condition.

[0385] Notably, embodiments relating to the first or second aspect of the invention are likewise applicable to embodiments of the third aspect, and embodiments relating to the third aspect of the invention are likewise applicable to embodiments relating to the first or second aspect of the invention.

[0386] In preferred embodiments of the third aspect, the method comprises a step of applying or administering to a subject the composition of the first aspect, or the kit or kit of parts of the second aspect, wherein said composition or kit or kit of parts is administered into the suprachoroidal space (SCS).

[0387] In preferred embodiments, the coding RNA of the composition and/or the encoded peptide (provided by the coding RNA) is substantially localized to (therapeutically relevant) cells and/or tissues, preferably to (therapeutically relevant) cells and/or tissues of the posterior segment of the eye upon SCS administration.

[0388] In particular, such the method may comprise the steps of:

[0389] a) providing the composition of the first aspect, or the kit or kit of parts of the second aspect;

[0390] b) administering said composition or kit or kit of parts to the SCS;

[0391] c) optionally, administering a further substance (e.g. an anti-inflammatory drug, a vascular endothelial growth factor modulator, a platelet derived growth factor modulator, an angiogenesis inhibitor, an immunosuppressive agent, a vascular permeability inhibitor, or a combination thereof), preferably to the SCS or intravitreally;

[0392] d) optionally, administering a further coding RNA and/or guide RNA, preferably to the SCS or intravitreally.

[0393] In a preferred embodiment of the third aspect, the invention relates to a method for gene therapy of an ophthalmic disease, disorder, or condition.

[0394] In preferred embodiments, the method for gene therapy comprises a step of applying or administering to a subject a composition of the first aspect, or the kit or kit of parts of the second aspect, wherein said composition or kit or kit of parts is administered into the suprachoroidal space (SCS), wherein said composition or kit or kit of parts comprises a coding RNA encoding at least one CRISP-associated endonuclease and at least one guide RNA.

[0395] In preferred embodiments, the coding RNA encoding at least one CRISP-associated endonuclease and/or the CRISP-associated endonuclease is substantially localized to (therapeutically relevant) cells and/or tissues, preferably to (therapeutically relevant) cells and/or tissues of the posterior segment of the eye upon SCS administration.

[0396] In particular, such the method for gene therapy may comprise the steps of:
[0397] a) providing a composition, or the kit or kit of parts, comprising at least one coding RNA encoding at least one CRISP-associated endonuclease and, optionally, at least one guide RNA;
[0398] b) applying or administering said composition, or kit or kit of parts to the eye of a subject in need of gene therapy, wherein applying or administering is performed by administering to the SCS;
[0399] c) optionally, administering a further substance (e.g. an anti-inflammatory drug, a vascular endothelial growth factor modulator, a platelet derived growth factor modulator, an angiogenesis inhibitor, an immunosuppressive agent, a vascular permeability inhibitor, or a combination thereof), preferably to the SCS or intravitreally;
[0400] d) optionally, administering a further coding RNA and/or guide RNA, preferably to the SCS or intravitreally,

[0401] “Gene therapy” preferably involves modulating (i.e. restoring, enhancing, decreasing or inhibiting) gene expression in a subject in order to achieve a therapeutic effect. To this end, gene therapy typically encompasses the introduction of nucleic acids into cells. The term generally refers to the manipulation of a genome for therapeutic purposes and includes the use of genome-editing technologies (e.g. CRISPR/Cas) for correction of mutations that cause disease, the addition of therapeutic genes to the genome, the removal of deleterious genes or genome sequences, and the modulation of gene expression. Gene therapy may involve in vivo or ex vivo transformation of the host cells.

[0402] In a fourth aspect, the present invention relates to a method of delivering a coding RNA molecule to cells and/or tissues of the eye of a subject, said method comprising the steps of providing a composition comprising said coding RNA preferably as defined herein, or a composition, preferably as defined herein, or kit or kit of parts preferably as defined herein, and delivering said coding RNA, composition, or kit or kit of parts to cells and/or tissues of the eye of the subject, wherein delivering is performed by administering said composition to the SCS.

[0403] Notably, embodiments relating to the first, second, or third aspect of the invention are likewise applicable to embodiments of the fourth aspect, and embodiments relating to the fourth aspect of the invention are likewise applicable to embodiments relating to the first, second, or third aspect of the invention.

[0404] In preferred embodiments of the fourth aspect, delivering via SCS leads to expression, that is translation, of the encoded protein in cells and/or tissues of the eye, preferably in therapeutically relevant cells or tissues of the eye (as defined above).

[0405] In preferred embodiments of the third an fourth aspect, SCS administration is preferably performed in a non-surgical manner, e.g. via an injection needle, a microneedle, an injection device, a microinjection device, a catheter, an implant delivery device, or a microcannula to a subject, preferably to a subject in need of treatment.

[0406] In preferred embodiments of the third an fourth aspect, the administering step comprises inserting a hollow microneedle into the sclera at an insertion site, the microneedle having a tip end with an opening, and infusing the composition as defined in the context of the first aspect into the SCS through the inserted microneedle.

[0407] Suitably, the microneedle has a length suitable for SCS delivery, e.g. of from about 500 μm to about 1500 μm.

[0408] Suitably, the microneedle has a diameter suitable for SCS delivery, e.g. of from about 200 μm to about 600 μm.

[0409] In preferred embodiments of the third an fourth aspect, the microneedle is inserted into the sclera without penetrating through the sclera and/or the microneedle is inserted into the sclera without penetrating through the choroid, thereby administering the composition comprising coding RNA into the SCS.

[0410] In preferred embodiments of the third an fourth aspect, the microneedle is inserted into the surface of the sclera at an angle of from about 70 degrees to about 110 degrees, wherein, preferably, the microneedle is inserted into the surface of the sclera at an angle of about 90 degrees.

[0411] The methods outlined in the context of the third and fourth aspect may be applied for laboratory, for research, for diagnostic, for commercial purposes and/or for therapeutic purposes. Preferably, the methods may be carried out in the context of the treatment or prevention of ophthalmic diseases, disorders or conditions as defined herein.

### BRIEF DESCRIPTION OF LISTS AND TABLES

[0412] List 1: Suitable therapeutic proteins provided by the coding RNA of the invention

[0413] Table 1: Suitable therapeutic proteins and sequences provided by the coding RNA of the composition

[0414] Table 2: Human codon usage table with frequencies indicated for each amino acid

[0415] Table 3: SCS administration of coding RNA compositions, experimental setup 1

[0416] Table 4: Suprachoroidal administration of coding RNA compositions, experimental setup 2

[0417] Table 5: Suprachoroidal administration of coding RNA compositions (Example 3)

### BRIEF DESCRIPTION OF THE DRAWINGS

[0418] FIG. 1 cross-sectional view of an illustration of the human eye, comprising anterior region or segment 12, posterior region or segment 14, cornea 16, lens 18, sclera 20, anterior chamber 22, iris 24, cornea 16, posterior chamber 26, limbus 38, conjunctiva 45, choroid 28, retina 27, retinachoroidal tissue (choroid 28, retina 27), vitreous 30, ciliary body 32, ora serrata 34, suprachoroidal space (SCS) 36. Further explanations are provided in the description.

[0419] FIG. 2 shows a cross-sectional view of a portion of the human eye, illustrating the suprachoroidal space 36, Sclera 20, Tenon's Capsule 46, conjunctiva 45, choroid 28, and retina 27. As indicated, the sclera 20 has a typical thickness between about 500 μm and 700 μm. Further explanations are provided in the description.

[0420] FIG. 3 shows the transfection efficiency analysis 24h post SCS injection. Shown are luminescence values, expressed as relative light units (RLU), for pooled lysate samples derived from different sections of the eye. Values represent the luciferase levels in the whole eye (see experimental setup 1, Table 3, Example 2).

[0421] FIG. 4 shows the transfection efficiency analysis 24h post SCS injection. Shown are luminescence values, expressed as relative light units (RLU), for cell lysates (C=cells) (see experimental setup 1, Table 3, Example 2).

[0422] FIG. 5 shows the transfection efficiency analysis 24h post SCS injection. Shown are luminescence values, expressed as relative light units (RLU), for sclera lysates (S=sclera) (see experimental setup 1, Table 3, Example 2).

[0423] FIG. 6 shows the transfection efficiency analysis 72h post SCS injection. Shown are luminescence values, expressed as relative light units (RLU), for pooled lysate samples deriving from different sections of the eye. Values represent the luciferase levels in the whole eye (see experimental setup 2, Table 4, Example 2).

[0424] FIG. 7 shows the transfection efficiency analysis 72h post SCS injection. Shown are luminescence values, expressed as relative light units (RLU), for cell lysates (C=cells) (see experimental setup 2, Table 4, Example 2).

[0425] FIG. 8 shows the results of the expression analysis 72h post SCS injection. Shown are luminescence values, expressed as relative light units (RLU), for sclera lysates (S=sclera) (see experimental setup 2, Table 4, Example 2).

[0426] FIG. 9 shows the results of the expression analysis 72h post SCS injection. Microscopy image of a tissue sample of the eye (A). SCS delivery of 50 μg coding RNA led to a strong expression of the reporter protein in photoreceptor cells (fluorescent signal in black). For experimental details, see Example 3.

### EXAMPLES

[0427] The following examples are given to enable those skilled in the art to more clearly understand and to practice the present invention. The present invention, however, is not limited in scope by the exemplified embodiments, which are intended as illustrations of single aspects of the invention only, and methods which are functionally equivalent are within the scope of the invention. Indeed, various modifications of the invention in addition to those described herein will become readily apparent to those skilled in the art from the foregoing description, accompanying figures and the examples below. All such modifications fall within the scope of the appended claims.

### Example 1: Preparation Compositions for In Vivo Experiments

[0428] The present Example provides methods of obtaining the coding RNA as well as methods of generating a composition of the invention.

[0429] 1.1. Preparation of DNA and RNA Constructs:

[0430] A DNA sequence encoding luciferase was prepared and used for subsequent RNA in vitro transcription. Said DNA sequence was prepared by modifying the wild type cds sequences by introducing a GC optimized. Sequences were introduced into a plasmid vector to comprising UTR sequences, a stretch of adenosines, a histone-stem-loop structure, and a stretch of 30 cytosines. Obtained plasmid DNA was transformed and propagated in bacteria using common protocols and plasmid DNA was extracted, purified, and used for subsequent RNA in vitro transcription.

[0431] 1.2. RNA In Vitro Transcription from Plasmid DNA Templates:

[0432] DNA plasmids were enzymatically linearized using EcoRI and used for DNA dependent RNA in vitro transcription using T7 RNA polymerase in the presence of a nucleotide mixture (ATP/GTP/CTP/UTP) and cap analog (e.g., m7GpppG) under suitable buffer conditions. The obtained coding RNA constructs were purified using RP-HPLC (PureMessenger®, CureVac AG, Tübingen, Germany; according to WO2008/077592). The obtained m7G capped coding RNA was additionally methylated using Cap specific 2-O-methyltransferase enzyme, and enzymatically polyadenylated using a commercial Polyadenylation kit (coding RNA: SEQ ID NO: 1)

[0433] 1.3. Preparation of a Composition Comprising LNP Formulated Coding RNA:

[0434] Lipid nanoparticles (LNP) were prepared according to the general procedures described in WO2015/199952, WO2017/004143 and WO2017/075531. LNP formulated coding RNA was prepared using an ionizable amino lipid (cationic lipid), phospholipid, cholesterol and a PEGylated lipid. Briefly, lipid compounds were solubilized in ethanol at a molar ratio (%) of approximately 47.4:10:40.9:1.7 (DC-cholesterol:DSPC:cholesterol:PE-PEG). RNA was diluted to 0.05 mg/mL in 10 mM to 50 mM citrate buffer, pH4. Syringe pumps were used to mix the ethanolic lipid solution with the RNA aqueous solution at a ratio of about 1:3 (vol/vol) with total flow rates above 15 ml/min. The ethanol was then removed and the external buffer replaced with a PBS buffer by dialysis. Finally, the lipid nanoparticles were filtered through a 0.2 μm pore sterile filter and the LNP-formulated RNA composition was adjusted to about 1 mg/ml total RNA.

[0435] The LNP solution was stored in the presence of trehalose at −80° C. till used. The obtained LNP-formulated RNA composition (1 mg/ml total RNA) was diluted to 0.25 μg/μl RNA target concentration using PBS before in vivo application.

[0436] 1.4. Preparation of a Composition Comprising Liposome Formulated Coding RNA:

[0437] Liposomes were prepared using a 50:100:2.5 ratio of DC-cholesterol, DOPE, and PEG-PE using methods as described in paragraph 1.3. Liposomes were dried over night, re-hydrated, and pre-formed Liposomes were mixed with the coding RNA. A composition comprising liposome-formulated coding RNA was used form in vivo experiments.

[0438] 1.5. Preparation of a Composition Comprising Polymer-Lipidoid Complexed Coding RNA:

[0439] Coding RNA constructs were complexed with a polymer-lipidoid prior to use in vivo. 20 mg peptide (CGHHHHHRRRRHHHHHGC-NH2; SEQ ID NO: 437) TFA salt was dissolved in 2 mL borate buffer pH 8.5 and stirred at room temperature for approx. 18h. Then, 12.6 mg PEG-SH 5000 (Sunbright) dissolved in N-methylpyrrolidone was added to the peptide solution and filled up to 3 mL with borate buffer pH 8.5. After 18h incubation at room temperature, the reaction mixture was purified and concentrated by centricon procedure (MWCO 10 kDa), washed against water, and lyophilized. The obtained lyophilisate is dissolved in ELGA water and the concentration of the polymer was adjusted to 10 mg/mL. The obtained polyethylene glycol/peptide polymers (HO-PEG 5000-S-(S—CHHHHHHRRRRHHHHHHC-S-)7-S-PEG 5000-OH) were used for further formulation. Ringer lactate buffer (RiLa; alternatively e.g. saline (NaCl) or PBS buffer may be used), respective amounts of lipidoid (“lipidoid 1” or “lipidoid 2”), and respective amounts of said polymer were mixed to prepare compositions comprising a lipidoid and a peptide or polymer. Then, the polymer-lipidoid carrier compositions were used to assemble nanoparticles with the coding RNA by mixing the coding RNA with respective amounts of polymer-lipidoid carrier by incubation of 10 min at RT. Size measurements were performed to evaluate whether the obtained nanoparticles have a uniform size profile.

### Example 2: Suprachoroidal Injection of Compositions Comprising Coding RNA

[0440] The present example shows that compositions comprising coding RNA were successfully delivered via ocular delivery into the suprachoroidal space (SCS), and that the encoded Protein, provided by the coding RNA of the composition, is strongly expressed in various ocular tissues.

[0441] 2.1. Experimental Setup:

[0442] In a first experiment, New Zeeland white rabbits were injected by suprachoroidal injection via an injection needle into the eye (2 eyes per rabbit), using different compositions comprising coding RNA (SEQ ID NO: 1; compositions generated as described in Example 1) at day 0, analysis was performed 24h post SCS injection (see section 2.2). Experimental setup is provided in Table 3.

[0443] In a second experiment, New Zeeland white rabbits were injected by suprachoroidal injection via an injection needle into the eye (2 eyes per rabbit), using different compositions comprising coding RNA (SEQ ID NO: 1; compositions generated as described in Example 1) at day 0, analysis was performed 72h post SCS injection (see section 2.2). In addition, a control group received NaCl (without coding RNA) to exclude any background. Experimental setup is provided in Table 4.

TABLE 3
Suprachoroidal administration of
coding RNA compositions, experimental setup 1

| | Rabbit | Formulation | administration route | volume | μg RNA |
|---|---|---|---|---|---|
| A | 1, 2 | RiLa | SCS, left and right eye | 100 μl | 25 |
| B | 3, 4 | lipidoid 1 | SCS, left and right eye | 100 μl | 25 |
| C | 5, 6 | lipidoid 2 | SCS, left and right eye | 100 μl | 25 |
| D | 7, 8 | LNP | SCS, left and right eye | 100 μl | 25 |
| | | (see 1.3) | | | |
| E | 9, 10 | Liposomes | SCS, left and right eye | 100 μl | 25 |
| | | (see 1.4) | | | |

TABLE 4
Suprachoroidal administration of
coding RNA compositions, experimental setup 2

| | | | | volume per | |
|---|---|---|---|---|---|
| | Rabbit | Formulation | B | injection | μg RNA |
| F | 1, 2 | RiLa | SCS, left and | 100 μl | 25 |
| | | | right eye | | |
| G | 3, 4 | lipidoid 1 | SCS, left and | 100 μl | 25 |
| | | | right eye | | |
| H | 5, 6 | lipidoid 2 | SCS, left and | 100 μl | 25 |
| | | | right eye | | |
| I | 7, 8 | LNP | SCS, left and | 100 μl | 25 |
| | | (see 1.3) | right eye | | |
| J | 9, 10 | NaCl | SCS, left and | 100 μl | 0 |
| | | | right eye | | |

[0444] 2.1. Expression Analysis:

[0445] 24h post injection (experimental setup 1) and 72h post injection (experimental setup 2), eyes were dissected and subsequently used for transfection efficiency analysis using a standard luciferase assay.

[0446] Luciferase assay: Eyes were cut through the pupil and vitreous was removed. After cutting the rest in two pieces, cell material (retinal cells etc.) loosely attached was scraped out of sclera with a scalpel (C=cells). 500 μl lysis buffer (1 mM PMSF and 2 mM DTT) was added to each fraction. The solid eye tissues, mainly containing sclera and cell strongly attached to it, were placed in another 500 μl of lysis buffer (S=sclera). After adding a steel bead, samples were placed in a commercially available tissue lyser. Samples were lysed at full speed for 6 min. Lysed samples were centrifuged at 13500 rpm at 4° C. for 10 min. Collected supernatant were transferred to a new vial. 50 μl of each of the individual fractions were placed in duplicate in a 96-well plate for luciferase measurement. To estimate total levels of luciferase activity per eye 20 μl of lysates deriving from different eye sections were pooled together. The values of relative light units deriving from these samples were multiplied by 33.3. Luciferase measurement: PpLuc measurement was performed with 20 μl of each fraction/well (sample or standard) using common protocols and reagents. In short, the luminescence assay was performed in a TriStar2S LB942 plate reader, using freshly prepared luciferase substrate (Promega), and 20 sec counting time. The results of the Luciferase measurement for individual tissue samples (C=cells, S=sclera), and total eye (pooled samples) are shown in FIGS. 3-5 (experimental setup 1), and FIGS. 6-8 (experimental setup 1)

[0447] Results:

[0448] As shown in FIGS. 3-8, all tested compositions comprising coding RNA that were injected into the SCS led to a surprisingly strong and durable expression of the encoded luciferase protein in ocular tissues. In particular, strong expression was detected in sclera (“S”) and cell samples (“C”). The data demonstrates, for the first time, that coding RNA is delivered via the SCS to reach ocular tissues, leading to expression of the protein in different cell types of the eye (e.g. retinal cells). That finding opens as yet unexpected treatment options for RNA therapeutics, and that SCS delivery can be used to address ocular diseases associated with diseases or disorders of the posterior segment of the eye.

### Example 3: Suprachoroidal Injection of Coding RNA Results in Strong Expression in Photoreceptor Cells

[0449] The present example shows that a composition comprising coding RNA was successfully delivered via ocular delivery into the suprachoroidal space (SCS), and that the encoded protein, provided by the coding RNA of the composition, was strongly expressed in therapeutically relevant cell types, such as retinal cells, e.g. photoreceptors (rods, cones). The data demonstrates for the first time that SCS delivery of a (long) coding RNA results in expression of the encoded protein in therapeutically relevant cell types.

[0450] 3.1. Experimental Setup:

[0451] New Zeeland white rabbits were injected with coding RNA by suprachoroidal injection via an injection needle into the eye, using compositions comprising coding RNA, encoding a fluorescent reporter (construct SEQ ID NO: 438; compositions generated as described in Example 1). Tissue samples of the SCS injected eyes were taken and analyzed for spacial (cellular) expression of the reporter construct using fluorescence microscopy. An exemplary microscopy image such a sample is shown in FIG. 9.

[0452] Results:

[0453] As shown in FIG. 9, SCS delivery of a coding RNA led to strong expression of the protein in therapeutically relevant cell types, including photoreceptor cells (fluorescent signal in photoreceptor cells in black).

[0454] The data demonstrates, for the first time, that coding RNA delivered via the SCS to reaches therapeutically relevant cell types, and that those cell types express the encoded protein. That finding opens as yet unexpected treatment options for RNA therapeutics, and that SCS delivery is suitable for addressing ocular diseases associated with diseases or disorders of the posterior segment of the eye. These unexpected results demonstrate that various ocular diseases associated with photoreceptor cells can now be addressed using SCS delivery of RNA therapeutics.

1. A composition comprising at least one coding RNA, wherein said at least one coding RNA comprises at least one coding sequence encoding at least one peptide or protein for use in treatment or prevention of an ophthalmic disease, disorder or condition, wherein said composition is administered into the suprachoroidal space (SCS) to a subject in need thereof.

2. Composition for use of claim 1, wherein administration into the SCS results in expression and/or activity of the encoded peptide or protein in cells and/or tissues of the eye, preferably in cells and/or tissues located in the posterior segment of the eye.

3. Composition for use of claim 2, wherein the cells and/or tissues of the eye are selected from sclera, choroid, retina, optic nerve, macula, scleral cells, choroid plexus epithelial cells, retinal cells, retinal pigment epithelium, bruch's membrane, and retinal blood vessels.

4. Composition for use of claim 2 or 3, wherein the cells from retina are selected from photoreceptor cells, bipolar cells, ganglion cells, horizontal cells, and amacrine cells.

5. Composition for use of any one of the preceding claims, wherein administered into the SCS leads to translation of the encoded peptide or protein, thereby exerting a therapeutic effect.

6. Composition for use of claim 5, wherein the therapeutic effect is selected from reduced neovascularization, reduced inflammation, neuroprotection, complement inhibition, reduced drusen formation, reduced scar formation, and/or reduction in choriocapillaris.

7. Composition for use of any one of the preceding claims, wherein the ophthalmic disease, disorder or condition is selected from neovascularization, retinal degenerative disease, diabetic eye disease, retinal detachment, optic nerve disease, endocrine disorders, cancer disease, infectious disease, parasitic disease, pigmentary uveitis, branch retinal vein occlusion, central retinal vein occlusion, macular edema, cystoid macular edema, uveitic macular edema, cytomegalovirus retinitis, endophthalmitis, scleritis, choriotetinitis, dry eye syndrome, Norris disease, Coat's disease, persistent hyperplastic primary vitreous, familial exudative vitreoretinopathy, Leber congenital amaurosis, X-linked retinoschisis, Leber's hereditary optic neurophathy, uveitis, refraction and accommodation disorders, keratoconus, amblyopia, conjunctivitis, corneal ulcers, dacryocystitis, Duane retraction syndrome, optic neuritis, ocular inflammation, glaucoma, macular degeneration, and uveitis, or any disease, disorder or condition related or associated thereto.

8. Composition for use of any one of the preceding claims, wherein the at least one peptide or protein is or is derived from a therapeutic peptide or protein.

9. Composition for use of claim 8, wherein the therapeutic peptide or protein is or is derived from an antibody, an antibody fragment, an intrabody, a receptor, a binding protein, a CRISPR-associated endonuclease, a transcription factor, an enzyme, a growth factor, a structural protein, a cytoplasmic or cytoskeletal protein, or fragments, variants, or combinations of any of these.

10. Composition for use of claim 9, wherein the CRISPR-associated endonuclease, is or is derived from Cas9, Cpf1, C2c1, C2c3, and C2c2, Cas13, CasX and CasY, or fragments, variants, or combinations of any of these.

11. Composition for use of claim 9, wherein the antibody, or antibody fragment, is or is derived from an antibody or antibody fragment against a platelet derived growth factor (PDGF), or an antibody or antibody fragment against vascular endothelial growth factor (VEGF).

12. Composition for use of any one of the preceding claims, wherein the at least one peptide or protein is selected from ABCA4, ADRB1, ANGPT1, ANGPT2, BEST1, CCR3, CD276, CD59, CFD, CHM, CHST4, CNR1, CNTF, CRYAA, CRYAB, CSF3R, DCN, DICER1, DRD2, EGFR, EGLN1, ENG, FLT1, FLT1(1-758), FLT1-iso3(sFlt1-14), FLT1-iso2(sFlt1), FLT1-iso4, GUCY1A1, GUCY1A2, GUCY1B1, GUCY1B2, GUCY2D, GUCY2F, HEY1, HEPH, HEPHL1, IL1RN, KDR, MAG, MERTK, MYO7A, MYOC, NOTCH4, NR3C1, NXNL1, OPA1, OPA3, OPTN, PDGFA, PDGFB, PDGFC, PDGFD, PDGFRA, PDGFRB, PGF, PLXND1, PPP3CA, PPP3CB, PPP3CC, PPP3R1, PPP3R2, PRPH2, PTGDR, PTGDR2, PTGER1, PTGER2, PTGER3, PTGER4, PTGFR, PTGIR, RHO, RLBP1, ROCK1, ROCK2, RPE65, RPGR, RS1, SEMA3E, SEMA3A, SERPINF1, SIRT1, SIRT2, SIRT3, SIRT4, SIRT5, SIRT6, SIRT7, SOD1, TBXA2R, TEK, TIE1, TNF, TNFRSF10C, UNC5B, USH2A, VEGFA, VEGFA-isoVEGF165, VEGFA-isoVEGF165B, VEGFB, VEGFC, VEGFD, WFS1, aflibercept, etanercept, bevacizumab, ranibizumab, anti-CCL11 antibody, anti-PDGFB antibody, anti-PDGFA antibody, bersanlimab, clazakizumab, olokizumab, sarilumab, siltuximab, sirukumab, DPP4-Fc, IL6R-Fc, PDGFRB-Fc, TNFRSF10A-Fc, TNFRSF10B-Fc, TNFRSF1A-Fc, TNFRSF1B-Fc, UNC5B-Fc, PDGFRB-trap(IgG4), PDGFRB-trap(IgG1), Cas9, Cpf1, C2c1, C2c3, and C2c2, Cas13, CasX and CasY, or a fragment or variant thereof

13. Composition for use of any one of the preceding claims, wherein the at least one coding sequence encodes at least one peptide or protein comprising or consisting of an amino acid sequences being identical or at least 70%, 80%, 85%, 86%, 87%, 88%, 89%, 90%, 91%, 92%, 93%, 94%, 95%, 96%, 97%, 98%, or 99% identical to any one of SEQ ID NOs: 2-365, 436 or a fragment or variant thereof of any of these sequences.

14. Composition for use of any one of the preceding claims, wherein the at least one coding sequence encodes at least one CRISPR-associated endonuclease comprising or consisting of an amino acid sequences being identical or at least 70%, 80%, 85%, 86%, 87%, 88%, 89%, 90%, 91%, 92%, 93%, 94%, 95%, 96%, 97%, 98%, or 99% identical to any one of SEQ ID NOs: 428-1345, 10999-11001 of published PCT patent application WO2018/172556.

15. Composition for use of any one of the preceding claims, wherein the at least one coding RNA and/or the at least one coding sequence comprise at least one modified nucleotide preferably selected from pseudouridine (ψ), N1-methylpseudouridine (m1ψ), 5-methylcytosine, and 5-methoxyuridine.

16. Composition for use of any one of the preceding claims, wherein the at least one coding sequence is a codon modified coding sequence, wherein the amino acid sequence encoded by the at least one codon modified coding sequence is preferably not being modified compared to the amino acid sequence encoded by the corresponding wild type coding sequence.

17. Composition for use of claim 16, wherein the at least one codon modified coding sequence is selected from C maximized coding sequence, CAI maximized coding sequence, human codon usage adapted coding sequence, G/C content modified coding sequence, and G/C optimized coding sequence, or any combination thereof.

18. Composition for use of any one of the preceding claims, wherein the least one coding RNA is an mRNA, a self-replicating RNA, a circular RNA, a viral RNA, or a replicon RNA, preferably an mRNA.

19. Composition for use of any one of the preceding claims, wherein the least one coding RNA comprises a 5′-cap structure, preferably m7G, cap0, cap1, cap2, a modified cap0 or a modified cap1 structure.

20. Composition for use of any one of the preceding claims, wherein the least one coding RNA comprises at least one poly(A) sequence, and/or at least one poly(C) sequence, and/or at least one histone stem-loop.

21. Composition for use of any one of the preceding claims, wherein the at least one coding RNA comprises at least one heterologous 5′-UTR and/or at least one heterologous 3′-UTR.

22. Composition for use of claim 21, wherein the at least one heterologous 3-UTR comprises a nucleic acid sequence derived from a 3′-UTR of a gene selected from PSMB3, ALB7, alpha-globin, CASP1, COX6B1, GNAS, NDUFA1 and RPS9, or from a homolog, a fragment or a variant of any one of these genes.

23. Composition for use of claim 21, wherein the at least one heterologous 5′-UTR comprises a nucleic acid sequence derived from a 5′-UTR of a gene selected from HSD17B4, RPL32, ASAH1, ATP5A1, MP68, NDUFA4, NOSIP, RPL31, SLC7A3, TUBB4B and UBQLN2, or from a homolog, a fragment or variant of any one of these genes.

24. Composition for use of any one of the preceding claims, additionally comprising at least one pharmaceutically acceptable carrier or excipient, wherein the carrier or excipient is suitable for ocular administration, preferably for SCS administration.

25. Composition for use of any one of the preceding claims, comprising at least one coding RNA encoding a CRISPR-associated protein, preferably at least one RNA which is identical or at least 70%, 80%, 85%, 86%, 87%, 88%, 89%, 90%, 91%, 92%, 93%, 94%, 95%, 96%, 97%, 98%, or 99% identical to a nucleic acid sequence selected from the group consisting of SEQ ID NOs: 11011-11042; 11249-11280; 11131-11162; 11367-11398; 11485-11516; 11603-11634; 11721-11752; 11839-11870; 11044-11116; 11282-11354; 11164-11236; 11400-11472; 11518-11590; 11636-11708; 11754-11826; 11872-11944; 11011-11042; 11249-11280; 11044-11116; 11282-11354; 11131-11162; 11367-11398; 11485-11516; 11603-11634; 11721-11752; 11839-11870; 11164-11236; 11400-11472; 11518-11590; 11636-11708; 11754-11826; 11872-11944; 11120-11122; 11240 11241; 11358; 11359 11476; 11477; 11594; 11595; 11712; 11713; 11830; 11831; 11948; 11949; 11123-11130; 11360-11366; 11242-11248; 11478-11484; 11596-11602; 11714-11720; 11832-11838; 11950-11956, of WO2018/172556, and additionally, at least one guide RNA.

26. Composition for use of any one of the preceding claims, wherein the at least one coding RNA is complexed or associated with or at least partially complexed or partially associated with one or more cationic or polycationic compound, preferably cationic or polycationic polymer, cationic or polycationic polysaccharide, cationic or polycationic lipid, cationic or polycationic protein, or cationic or polycationic peptide, or any combinations thereof.

27. Composition for use of claim 26, wherein the one or more cationic or polycationic peptides are selected from SEQ ID NO: 432 to 435, or 437, or any combinations thereof.

28. Composition for use of claim 26, wherein the cationic or polycationic polymer is a polyethylene glycol/peptide polymer comprising HO-PEG5000-S-(S-CHHHHHHRRRRHHHHHHC-S-)7-S-PEG5000-OH (SEQ ID NO: 435 of the peptide monomer).

29. Composition for use of claim 26, wherein the cationic or polycationic polymer is a polyethylene glycol/peptide polymer comprising HO-PEG5000-S-(S-CGHHHHHRRRRHHHHHGC-S-)4-S-PEG5000-OH (SEQ ID NO: 437 of the peptide monomer).

30. Composition for use of claim 28 or 29, wherein the composition comprises a lipid component or a lipidoid component.

31. Composition for use of claim 27, wherein the at least one coding RNA is complexed, partially complexed, encapsulated, partially encapsulated, or associated with one or more lipids, thereby forming liposomes, lipid nanoparticles, lipoplexes, and/or nanoliposomes.

32. Composition for use of any one of the preceding claims, wherein the composition is administered in Ringer or Ringer-Lactate solution.

33. Composition for use of any one of the preceding claims, wherein administration into the SCS is performed by an injection needle, a microneedle, an injection device, a catheter, an implant delivery device, or a microcannula.

34. A kit or kit of parts comprising a composition as defined in claims 1 to 33 for use in treatment of an ophthalmic disease, disorder or condition, wherein said kit or kit of parts is administered into the SCS to a subject in need of treatment.

35. Kit or kit of parts for use of claim 30, comprising an injection needle, a microneedle, an injection device, a microinjection device, a catheter, an implant delivery device, or a microcannula.

36. A method of treating an ophthalmic disease, disorder, or condition comprising the steps of:
a) providing a composition comprising at least one coding RNA, preferably as defined in claims 1-33;
b) administering said composition to the SCS of a subject;
c) optionally, administering a further substance;
d) optionally, administering a further coding RNA and/or guide RNA.

37. A method of treating of claim 36, wherein the method is for gene therapy, comprising applying or administering to a subject in need thereof a composition comprising a coding RNA encoding at least one CRISPR-associated endonuclease, and at least one guide RNA, via administration into the SCS of a subject.

38. A method of delivering a coding RNA to cells and/or tissues of the eye of a subject, said method comprising the steps of providing a composition comprising said coding RNA, and delivering said composition to cells and/or tissues of the eye of the subject, wherein delivering is performed by administering said composition to the SCS of the subject.

39. A method of delivering of claim 38, wherein the composition is as defined in claims 1 to 33.

40. A method of treating of claims 36 to 37, or a method of delivering of claims 38 to 39, wherein administration to the SCS is performed by an injection needle, a microneedle, an injection device, a microinjection device, a catheter, an implant delivery device, or a microcannula.

The application's sequence listing, which the Patent Office published only in electronic form, follows.

SEQUENCE LISTING (438 sequences)

SEQ ID NO: 1 - RNA, 1929 nt, Artificial Sequence
  mRNA product Design a-1 comprising derived and/or modified sequence from Photinus pyralis__AAA88784.1__luciferase (opt1) R6551
gggagagucccgcagucggcguccagcggcucugcuuguucgugugugugucguugcaggccuuauucaagcuuaccauggaggacgccaagaacaucaagaagggcccggcgcccuucuacccgcuggaggacgggaccgccggcgagcagcuccacaaggccaugaagcgguacgcccuggugccgggcacgaucgccuucaccgacgcccacaucgaggucgacaucaccuacgcggaguacuucgagaugagcgugcgccuggccgaggccaugaagcgguacggccugaacaccaaccaccggaucguggugugcucggagaacagccugcaguucuucaugccggugcugggcgcccucuucaucggcguggccgucgccccggcgaacgacaucuacaacgagcgggagcugcugaacagcauggggaucagccagccgaccgugguguucgugagcaagaagggccugcagaagauccugaacgugcagaagaagcugcccaucauccagaagaucaucaucauggacagcaagaccgacuaccagggcuuccagucgauguacacguucgugaccagccaccucccgccgggcuucaacgaguacgacuucgucccggagagcuucgaccgggacaagaccaucgcccugaucaugaacagcagcggcagcaccggccugccgaaggggguggcccugccgcaccggaccgccugcgugcgcuucucgcacgcccgggaccccaucuucggcaaccagaucaucccggacaccgccauccugagcguggugccguuccaccacggcuucggcauguucacgacccugggcuaccucaucugcggcuuccgggugguccugauguaccgguucgaggaggagcuguuccugcggagccugcaggacuacaagauccagagcgcgcugcucgugccgacccuguucagcuucuucgccaagagcacccugaucgacaaguacgaccugucgaaccugcacgagaucgccagcgggggcgccccgcugagcaaggaggugggcgaggccguggccaagcgguuccaccucccgggcauccgccagggcuacggccugaccgagaccacgagcgcgauccugaucacccccgagggggacgacaagccgggcgccgugggcaagguggucccguucuucgaggccaaggugguggaccuggacaccggcaagacccugggcgugaaccagcggggcgagcugugcgugcgggggccgaugaucaugagcggcuacgugaacaacccggaggccaccaacgcccucaucgacaaggacggcuggcugcacagcggcgacaucgccuacugggacgaggacgagcacuucuucaucgucgaccggcugaagucgcugaucaaguacaagggcuaccagguggcgccggccgagcuggagagcauccugcuccagcaccccaacaucuucgacgccggcguggccgggcugccggacgacgacgccggcgagcugccggccgcggugguggugcuggagcacggcaagaccaugacggagaaggagaucgucgacuacguggccagccaggugaccaccgccaagaagcugcggggcggcgugguguucguggacgaggucccgaagggccugaccgggaagcucgacgcccggaagauccgcgagauccugaucaaggccaagaagggcggcaagaucgccgugugaggacuagucccuguucccagagcccacuuuuuuuucuuuuuuugaaauaaaauagccugucuuucagaucuaaaaaaaaaaaaaaaaaaaaaaaaaaaaaaaaaaaaaaaaaaaaaaaaaaaaaaaaaaaaaaaaugcaucccccccccccccccccccccccccccccccaaaggcucuuuucagagccaccagaauu

SEQ ID NO: 2 - protein, 2273 aa, Artificial Sequence [sequence omitted]

SEQ ID NO: 3 - protein, 1065 aa, Artificial Sequence
  derived and/or modified protein sequence (wt) from Homo sapiens__ENST00000536513.5__ABCA4
MDVVLHHVPEAKLVECIGQELIFLLPNKNFKHRAYASLFRELEETLADLGLSSFGISDTPLEEIFLKVTEDSDSGPLFAGGAQQKRENVNPRHPCLGPREKAGQTPQDSNVCSPGAPAAHPEGQPPPEPECPGPQLNTGTQLVLQHVQALLVKRFQHTIRSHKDFLAQIVLPATFVFLALMLSIVIPPFGEYPALTLHPWIYGQQYTFFSMDEPGSEQFTVLADVLLNKPGFGNRCLKEGWLPEYPCGNSTPWKTPSVSPNITQLFQKQKWTQVNPSPSCRCSTREKLTMLPECPEGAGGLPPPQRTQRSTEILQDLTDRNISDFLVKTYPALIRSSLKSKFWVNEQRYGGISIGGKLPVVPITGEALVGFLSDLGRIMNVSGGPITREASKEIPDFLKHLETEDNIKVWFNNKGWHALVSFLNVAHNAILRASLPKDRSPEEYGITVISQPLNLTKEQLSEITVLTTSVDAVVAICVIFSMSFVPASFVLYLIQERVNKSKHLQFISGVSPTTYWVTNFLWDIMNYSVSAGLVVGIFIGFQKKAYTSPENLPALVALLLLYGWAVIPMMYPASFLFDVPSTAYVALSCANLFIGINSSAITFILELFENNRTLLRFNAVLRKLLIVFPHFCLGRGLIDLALSQAVTDVYARFGEEHSANPFHWDLIGKNLFAMVVEGVVYFLLTLLVQRHFFLSQWIAEPTKEPIVDEDDDVAEERQRIITGGNKTDILRLHELTKIYPGTSSPAVDRLCVGVRPGECFGLLGVNGAGKTTTFKMLTGDTTVTSGDATVAGKSILTNISEVHQNMGYCPQFDAIDELLTGREHLYLYARLRGVPAEEIEKVANWSIKSLGLTVYADCLAGTYSGGNKRKLSTAIALIGCPPLVLLDEPTTGMDPQARRMLWNVIVSIIREGRAVVLTSHSMEECEALCTRLAIMVKGAFRCMGTIQHLKSKFGDGYIVTMKIKSPKDDLLPDLNPVEQFFQGNFPGSVQRERHYNMLQFQVSSSSLARIFQLLLSHKDSLLIEEYSVTQTTLDQVFVNFAKQQTESHDLPLHPRAAGASRQAQD

SEQ ID NO: 4 - protein, 477 aa, Artificial Sequence
  derived and/or modified protein sequence (wt) from Homo sapiens__ENST00000369295.3__ADRB1
MGAGVLVLGASEPGNLSSAAPLPDGAATAARLLVPASPPASLLPPASESPEPLSQQWTAGMGLLMALIVLLIVAGNVLVIVAIAKTPRLQTLTNLFIMSLASADLVMGLLVVPFGATIVVWGRWEYGSFFCELWTSVDVLCVTASIETLCVIALDRYLAITSPFRYQSLLTRARARGLVCTVWAISALVSFLPILMHWWRAESDEARRCYNDPKCCDFVTNRAYAIASSVVSFYVPLCIMAFVYLRVFREAQKQVKKIDSCERRFLGGPARPPSPSPSPVPAPAPPPGPPRPAAAAATAPLANGRAGKRRPSRLVALREQKALKTLGIIMGVFTLCWLPFFLANVVKAFHRELVPDRLFVFFNWLGYANSAFNPIIYCRSPDFRKAFQGLLCCARRAARRRHATHGDRPRASGCLARPGPPPSPGAASDDDDDDVVGATPPARLLEPWAGCNGGAAADSDSSLDEPCRPGFASESKV

SEQ ID NO: 5 - protein, 498 aa, Artificial Sequence
  derived and/or modified protein sequence (wt) from Homo sapiens__ENST00000517746.5__ANGPT1
MTVFLSFAFLAAILTHIGCSNQRRSPENSGRRYNRIQHGQCAYTFILPEHDGNCRESTTDQYNTNALQRDAPHVEPDFSSQKLQHLEHVMENYTQWLQKLENYIVENMKSEMAQIQQNAVQNHTATMLEIGTSLLSQTAEQTRKLTDVETQVLNQTSRLEIQLLENSLSTYKLEKQLLQQTNEILKIHEKNSLLEHKILEMEGKHKEELDTLKEEKENLQGLVTRQTYIIQELEKQLNRATTNNSVLQKQQLELMDTVHNLVNLCTKEGVLLKGGKREEEKPFRDCADVYQAGFNKSGIYTIYINNMPEPKKVFCNMDVNGGGWTVIQHREDGSLDFQRGWKEYKMGFGNPSGEYWLGNEFIFAITSQRQYMLRIELMDWEGNRAYSQYDRFHIGNEKQNYRLYLKGHTGTAGKQSSLILHGADFSTKDADNDNCMCKCALMLTGGWWFDACGPSNLNGMFYTAGQNHGKLNGIKWHYFKGPSYSLRSTTMMIRPLDF

SEQ ID NO: 6 - protein, 497 aa, Artificial Sequence
  derived and/or modified protein sequence (wt) from Homo sapiens__ENST00000297450.7__ANGPT1
MTVFLSFAFLAAILTHIGCSNQRRSPENSGRRYNRIQHGQCAYTFILPEHDGNCRESTTDQYNTNALQRDAPHVEPDFSSQKLQHLEHVMENYTQWLQKLENYIVENMKSEMAQIQQNAVQNHTATMLEIGTSLLSQTAEQTRKLTDVETQVLNQTSRLEIQLLENSLSTYKLEKQLLQQTNEILKIHEKNSLLEHKILEMEGKHKEELDTLKEEKENLQGLVTRQTYIIQELEKQLNRATTNNSVLQKQQLELMDTVHNLVNLCTKEVLLKGGKREEEKPFRDCADVYQAGFNKSGIYTIYINNMPEPKKVFCNMDVNGGGWTVIQHREDGSLDFQRGWKEYKMGFGNPSGEYWLGNEFIFAITSQRQYMLRIELMDWEGNRAYSQYDRFHIGNEKQNYRLYLKGHTGTAGKQSSLILHGADFSTKDADNDNCMCKCALMLTGGWWFDACGPSNLNGMFYTAGQNHGKLNGIKWHYFKGPSYSLRSTTMMIRPLDF

SEQ ID NO: 7 - protein, 298 aa, Artificial Sequence
  derived and/or modified protein sequence (wt) from Homo sapiens__ENST00000520734.5__ANGPT1
MEGKHKEELDTLKEEKENLQGLVTRQTYIIQELEKQLNRATTNNSVLQKQQLELMDTVHNLVNLCTKEGVLLKGGKREEEKPFRDCADVYQAGFNKSGIYTIYINNMPEPKKVFCNMDVNGGGWTVIQHREDGSLDFQRGWKEYKMGFGNPSGEYWLGNEFIFAITSQRQYMLRIELMDWEGNRAYSQYDRFHIGNEKQNYRLYLKGHTGTAGKQSSLILHGADFSTKDADNDNCMCKCALMLTGGWWFDACGPSNLNGMFYTAGQNHGKLNGIKWHYFKGPSYSLRSTTMMIRPLDF

SEQ ID NO: 8 - protein, 297 aa, Artificial Sequence
  derived and/or modified protein sequence (wt) from Homo sapiens__ENST00000520052.1__ANGPT1
MEGKHKEELDTLKEEKENLQGLVTRQTYIIQELEKQLNRATTNNSVLQKQQLELMDTVHNLVNLCTKEVLLKGGKREEEKPFRDCADVYQAGFNKSGIYTIYINNMPEPKKVFCNMDVNGGGWTVIQHREDGSLDFQRGWKEYKMGFGNPSGEYWLGNEFIFAITSQRQYMLRIELMDWEGNRAYSQYDRFHIGNEKQNYRLYLKGHTGTAGKQSSLILHGADFSTKDADNDNCMCKCALMLTGGWWFDACGPSNLNGMFYTAGQNHGKLNGIKWHYFKGPSYSLRSTTMMIRPLDF

SEQ ID NO: 9 - protein, 496 aa, Artificial Sequence
  derived and/or modified protein sequence (wt) from Homo sapiens__ENST00000325203.9__ANGPT2
MWQIVFFTLSCDLVLAAAYNNFRKSMDSIGKKQYQVQHGSCSYTFLLPEMDNCRSSSSPYVSNAVQRDAPLEYDDSVQRLQVLENIMENNTQWLMKLENYIQDNMKKEMVEIQQNAVQNQTAVMIEIGTNLLNQTAEQTRKLTDVEAQVLNQTTRLELQLLEHSLSTNKLEKQILDQTSEINKLQDKNSFLEKKVLAMEDKHIIQLQSIKEEKDQLQVLVSKQNSIIEELEKKIVTATVNNSVLQKQQHDLMETVNNLLTMMSTSNSAKDPTVAKEEQISFRDCAEVFKSGHTTNGIYTLTFPNSTEEIKAYCDMEAGGGGWTIIQRREDGSVDFQRTWKEYKVGFGNPSGEYWLGNEFVSQLTNQQRYVLKIHLKDWEGNEAYSLYEHFYLSSEELNYRIHLKGLTGTAGKISSISQPGNDFSTKDGDNDKCICKCSQMLTGGWWFDACGPSNLNGMYYPQRQNTNKFNGIKWYYWKGSGYSLKATTMMIRPADF

SEQ ID NO: 10 - protein, 495 aa, Artificial Sequence
  derived and/or modified protein sequence (wt) from Homo sapiens__ENST00000629816.2__ANGPT2
MWQIVFFTLSCDLVLAAAYNNFRKSMDSIGKKQYQVQHGSCSYTFLLPEMDNCRSSSSPYVSNAVQRDAPLEYDDSVQRLQVLENIMENNTQWLMKLENYIQDNMKKEMVEIQQNAVQNQTAVMIEIGTNLLNQTAEQTRKLTDVEAQVLNQTTRLELQLLEHSLSTNKLEKQILDQTSEINKLQDKNSFLEKKVLAMEDKHIIQLQSIKEEKDQLQVLVSKQNSIIEELEKKIVTATVNNSVLQKQQHDLMETVNNLLTMMSTSNSKDPTVAKEEQISFRDCAEVFKSGHTTNGIYTLTFPNSTEEIKAYCDMEAGGGGWTIIQRREDGSVDFQRTWKEYKVGFGNPSGEYWLGNEFVSQLTNQQRYVLKIHLKDWEGNEAYSLYEHFYLSSEELNYRIHLKGLTGTAGKISSISQPGNDFSTKDGDNDKCICKCSQMLTGGWWFDACGPSNLNGMYYPQRQNTNKFNGIKWYYWKGSGYSLKATTMMIRPADF

SEQ ID NO: 11 - protein, 459 aa, Artificial Sequence
  derived and/or modified protein sequence (wt) from Homo sapiens__ENST00000523120.2__ANGPT2
MWQIVFFTLSCDLVLAAAYNNFRKSMDSIGKKQYQVQHGSCSYTFLLPEMDNCRSSSSPYVSNAVQRDAPLEYDDSVQRLQVLENIMENNTQWLMKLENYIQDNMKKEMVEIQQNAVQNQTAVMIEIGTNLLNQTAEQTRKLTDVEAQVLNQTTRLELQLLEHSLSTNKLEKQILDQTSEINKLQDKNSFLEKKVLAMEDKHIIQLQSIKEEKDQLQVLVSKQNSIIEELEKKIVTATVNNSVLQKQQHDLMETVNNLLTMMSTSNSKDPTVAKEEQISFRDCAEVFKSGHTTNGIYTLTFPNSTEEIKAYCDMEAGGGGWTIIQRREDGSVDFQRTWKEYKVGFGNPSGEYWLGNEFVSQLTNQQRYVLKIHLKDWEGNEAYSLYEHFYLSSEELNYRIHLKGLTGTAGKISSISQPGNDFSTKDGDNDKCICKCSQMLTGGRDDFLSSYLYWQGMIS

SEQ ID NO: 12 - protein, 444 aa, Artificial Sequence
  derived and/or modified protein sequence (wt) from Homo sapiens__ENST00000338312.10__ANGPT2
MWQIVFFTLSCDLVLAAAYNNFRKSMDSIGKKQYQVQHGSCSYTFLLPEMDNCRSSSSPYVSNAVQRDAPLEYDDSVQRLQVLENIMENNTQWLMKVLNQTTRLELQLLEHSLSTNKLEKQILDQTSEINKLQDKNSFLEKKVLAMEDKHIIQLQSIKEEKDQLQVLVSKQNSIIEELEKKIVTATVNNSVLQKQQHDLMETVNNLLTMMSTSNSAKDPTVAKEEQISFRDCAEVFKSGHTTNGIYTLTFPNSTEEIKAYCDMEAGGGGWTIIQRREDGSVDFQRTWKEYKVGFGNPSGEYWLGNEFVSQLTNQQRYVLKIHLKDWEGNEAYSLYEHFYLSSEELNYRIHLKGLTGTAGKISSISQPGNDFSTKDGDNDKCICKCSQMLTGGWWFDACGPSNLNGMYYPQRQNTNKFNGIKWYYWKGSGYSLKATTMMIRPADF

SEQ ID NO: 13 - protein, 604 aa, Artificial Sequence
  derived and/or modified protein sequence (wt) from Homo sapiens__ENST00000449131.6__BEST1
MFEKLTLYCDSYIQLIPISFVLGFYVTLVVTRWWNQYENLPWPDRLMSLVSGFVEGKDEQGRLLRRTLIRYANLGNVLILRSVSTAVYKRFPSAQHLVQAGFMTPAEHKQLEKLSLPHNMFWVPWVWFANLSMKAWLGGRIRDPILLQSLLNEMNTLRTQCGHLYAYDWISIPLVYTQVVTVAVYSFFLTCLVGRQFLNPAKAYPGHELDLVVPVFTFLQFFFYVGWLKVAEQLINPFGEDDDDFETNWIVDRNLQVSLLAVDEMHQDLPRMEPDMYWNKPEPQPPYTAASAQFRRASFMGSTFNISLNKEEMEFQPNQEDEEDAHAGIIGRFLGLQSHDHHPPRANSRTKLLWPKRESLLHEGLPKNHKAAKQNVRGQEDNKAWKLKAVDAFKSAPLYQRPGYYSAPQTPLSPTPMFFPLEPSAPSKLHSVTGIDTKDKSLKTVSSGAKKSFELLSESDGALMEHPEVSQVRRKTVEFNLTDMPEIPENHLKEPLEQSPTNIHTTLKDHMDPYWALENRSVLHLNQGHCIALCPTPASLALSLPFLHNFLGFHHCQSTLDLRPALAWGIYLATFTGILGKCSGPFLTSPWYHPEDFLGPGEGR

SEQ ID NO: 14 - protein, 585 aa, Artificial Sequence
  derived and/or modified protein sequence (wt) from Homo sapiens__ENST00000378043.8__BEST1
MTITYTSQVANARLGSFSRLLLCWRGSIYKLLYGEFLIFLLCYYIIRFIYRLALTEEQQLMFEKLTLYCDSYIQLIPISFVLGFYVTLVVTRWWNQYENLPWPDRLMSLVSGFVEGKDEQGRLLRRTLIRYANLGNVLILRSVSTAVYKRFPSAQHLVQAGFMTPAEHKQLEKLSLPHNMFWVPWVWFANLSMKAWLGGRIRDPILLQSLLNEMNTLRTQCGHLYAYDWISIPLVYTQVVTVAVYSFFLTCLVGRQFLNPAKAYPGHELDLVVPVFTFLQFFFYVGWLKVAEQLINPFGEDDDDFETNWIVDRNLQVSLLAVDEMHQDLPRMEPDMYWNKPEPQPPYTAASAQFRRASFMGSTFNISLNKEEMEFQPNQEDEEDAHAGIIGRFLGLQSHDHHPPRANSRTKLLWPKRESLLHEGLPKNHKAAKQNVRGQEDNKAWKLKAVDAFKSAPLYQRPGYYSAPQTPLSPTPMFFPLEPSAPSKLHSVTGIDTKDKSLKTVSSGAKKSFELLSESDGALMEHPEVSQVRRKTVEFNLTDMPEIPENHLKEPLEQSPTNIHTTLKDHMDPYWALENRDEAHS

SEQ ID NO: 15 - protein, 435 aa, Artificial Sequence
  derived and/or modified protein sequence (wt) from Homo sapiens__ENST00000524926.5__BEST1
MTITYTSQVANARLGSFSRLLLCWRGSIYKLLYGEFLIFLLCYYIIRFIYRLALTEEQQLMFEKLTLYCDSYIQLIPISFVLGFYVTLVVTRWWNQYENLPWPDRLMSLVSGFVEGKDEQGRLLRRTLIRYANLGNVLILRSVSTAVYKRFPSAQHLVQAGFMTPAEHKQLEKLSLPHNMFWVPWVWFANLSMKAWLGGRIRDPILLQSLLNEMNTLRTQCGHLYAYDWISIPLVYTQVVTVAVYSFFLTCLVGRQFLNPAKAYPGHELDLVVPVFTFLQFFFYVGWLKVGLSRALLGWRHGQRGHGQQLPETRMQCQERKVSRVESSQAWWRTPVIPATREAEAGESLEPGRRRLWWQSSSSTPLERMMMILRPTGLSTGICRCPCWLWMRCTRTCLGWSRTCTGISPSHSPPTQLLPPSSVEPPLWAPPSTSA

SEQ ID NO: 16 - protein, 329 aa, Artificial Sequence
  derived and/or modified protein sequence (wt) from Homo sapiens__ENST00000526988.1__BEST1
MSLVSGFVEGKDEQGRLLRRTLIRYANLGNVLILRSVSTAVYKRFPSAQHLVQAGFMTPAEHKQLEKLSLPHNMFWVPWVWFANLSMKAWLGGRIRDPILLQSLLNEMNTLRTQCGHLYAYDWISIPLVYTQVVTVAVYSFFLTCLVGRQFLNPAKAYPGHELDLVVPVFTFLQFFFYVGWLKVGLSRALLGWRHGQRGHGQQLPETRMQCQERKVSRVESSQAWWRTPVIPATREAEAGESLEPGRRRLWWQSSSSTPLERMMMILRPTGLSTGICRCPCWLWMRCTRTCLGWSRTCTGISPSHSPPTQLLPPSSVEPPLWAPPSTSA

SEQ ID NO: 17 - protein, 55 aa, Artificial Sequence
  derived and/or modified protein sequence (wt) from Homo sapiens__ENST00000534553.5__BEST1
MSLVSGFVEGKDEQGRLLRRTLIRYANLGNVLILRSVSTAVYKRFPSAQHLVQAA

SEQ ID NO: 18 - protein, 376 aa, Artificial Sequence
  derived and/or modified protein sequence (wt) from Homo sapiens__ENST00000545097.1__CCR3
MPFGIRMLLRAHKPGSSRRSEMTTSLDTVETFGTTSYYDDVGLLCEKADTRALMAQFVPPLYSLVFTVGLLGNVVVVMILIKYRRLRIMTNIYLLNLAISDLLFLVTLPFWIHYVRGHNWVFGHGMCKLLSGFYHTGLYSEIFFIILLTIDRYLAIVHAVFALRARTVTFGVITSIVTWGLAVLAALPEFIFYETEELFEETLCSALYPEDTVYSWRHFHTLRMTIFCLVLPLLVMAICYTGIIKTLLRCPSKKKYKAIRLIFVIMAVFFIFWTPYNVAILLSSYQSILFGNDCERSKHLDLVMLVTEVIAYSHCCMNPVIYAFVGERFRKYLRHFFHRHLLMHLGRYIPFLPSEKLERTSSVSPSTAEPELSIVF

SEQ ID NO: 19 - protein, 355 aa, Artificial Sequence
  derived and/or modified protein sequence (wt) from Homo sapiens__ENST00000395940.2__CCR3
MTTSLDTVETFGTTSYYDDVGLLCEKADTRALMAQFVPPLYSLVFTVGLLGNVVVVMILIKYRRLRIMTNIYLLNLAISDLLFLVTLPFWIHYVRGHNWVFGHGMCKLLSGFYHTGLYSEIFFIILLTIDRYLAIVHAVFALRARTVTFGVITSIVTWGLAVLAALPEFIFYETEELFEETLCSALYPEDTVYSWRHFHTLRMTIFCLVLPLLVMAICYTGIIKTLLRCPSKKKYKAIRLIFVIMAVFFIFWTPYNVAILLSSYQSILFGNDCERSKHLDLVMLVTEVIAYSHCCMNPVIYAFVGERFRKYLRHFFHRHLLMHLGRYIPFLPSEKLERTSSVSPSTAEPELSIVF

SEQ ID NO: 20 - protein, 534 aa, Artificial Sequence
  derived and/or modified protein sequence (wt) from Homo sapiens__ENST00000318443.9__CD276
MLRRRGSPGMGVHVGAALGALWFCLTGALEVQVPEDPVVALVGTDATLCCSFSPEPGFSLAQLNLIWQLTDTKQLVHSFAEGQDQGSAYANRTALFPDLLAQGNASLRLQRVRVADEGSFTCFVSIRDFGSAAVSLQVAAPYSKPSMTLEPNKDLRPGDTVTITCSSYQGYPEAEVFWQDGQGVPLTGNVTTSQMANEQGLFDVHSILRVVLGANGTYSCLVRNPVLQQDAHSSVTITPQRSPTGAVEVQVPEDPVVALVGTDATLRCSFSPEPGFSLAQLNLIWQLTDTKQLVHSFTEGRDQGSAYANRTALFPDLLAQGNASLRLQRVRVADEGSFTCFVSIRDFGSAAVSLQVAAPYSKPSMTLEPNKDLRPGDTVTITCSSYRGYPEAEVFWQDGQGVPLTGNVTTSQMANEQGLFDVHSVLRVVLGANGTYSCLVRNPVLQQDAHGSVTITGQPMTFPPEALWVTVGLSVCLIALLVALAFVCWRKIKQSCEEENAGAEDQDGEGEGSKTALQPLKHSDSKEDDGQEIA

SEQ ID NO: 21 - protein, 533 aa, Artificial Sequence
  derived and/or modified protein sequence (wt) from Homo sapiens__ENST00000561213.5__CD276
MLRRRGSPGMGVHVGAALGALWFCLTGALEVQVPEDPVVALVGTDATLCCSFSPEPGFSLAQLNLIWQLTDTKQLVHSFAEGQDQGSAYANRTALFPDLLAQGNASLRLQRVRVADEGSFTCFVSIRDFGSAAVSLQVAAPYSKPSMTLEPNKDLRPGDTVTITCSSYQGYPEAEVFWQDGQGVPLTGNVTTSQMANEQGLFDVHSILRVVLGANGTYSCLVRNPVLQQDAHSSVTITPQRSPTGAVEVQVPEDPVVALVGTDATLRCSFSPEPGFSLAQLNLIWQLTDTKQLVHSFTEGRDQGSAYANRTALFPDLLAQGNASLRLQRVRVADEGSFTCFVSIRDFGSAAVSLQVAAPYSKPSMTLEPNKDLRPGDTVTITCSSYRGYPEAEVFWQDGQGVPLTGNVTTSQMANEQGLFDVHSVLRVVLGANGTYSCLVRNPVLQQDAHGSVTITGQPMTFPPEALWVTVGLSVCLIALLVALAFVCWRKIKQSCEEENAGAEDQDGEGEGSKTALQPLKHSDSKEGKDTWA

SEQ ID NO: 22 - protein, 388 aa, Artificial Sequence
  derived and/or modified protein sequence (wt) from Homo sapiens__ENST00000537340.6__CD276
MTLEPNKDLRPGDTVTITCSSYQGYPEAEVFWQDGQGVPLTGNVTTSQMANEQGLFDVHSILRVVLGANGTYSCLVRNPVLQQDAHSSVTITPQRSPTGAVEVQVPEDPVVALVGTDATLRCSFSPEPGFSLAQLNLIWQLTDTKQLVHSFTEGRDQGSAYANRTALFPDLLAQGNASLRLQRVRVADEGSFTCFVSIRDFGSAAVSLQVAAPYSKPSMTLEPNKDLRPGDTVTITCSSYRGYPEAEVFWQDGQGVPLTGNVTTSQMANEQGLFDVHSVLRVVLGANGTYSCLVRNPVLQQDAHGSVTITGQPMTFPPEALWVTVGLSVCLIALLVALAFVCWRKIKQSCEEENAGAEDQDGEGEGSKTALQPLKHSDSKEDDGQEIA

SEQ ID NO: 23 - protein, 316 aa, Artificial Sequence
  derived and/or modified protein sequence (wt) from Homo sapiens__ENST00000318424.9__CD276
MLRRRGSPGMGVHVGAALGALWFCLTGALEVQVPEDPVVALVGTDATLCCSFSPEPGFSLAQLNLIWQLTDTKQLVHSFAEGQDQGSAYANRTALFPDLLAQGNASLRLQRVRVADEGSFTCFVSIRDFGSAAVSLQVAAPYSKPSMTLEPNKDLRPGDTVTITCSSYRGYPEAEVFWQDGQGVPLTGNVTTSQMANEQGLFDVHSVLRVVLGANGTYSCLVRNPVLQQDAHGSVTITGQPMTFPPEALWVTVGLSVCLIALLVALAFVCWRKIKQSCEEENAGAEDQDGEGEGSKTALQPLKHSDSKEDDGQEIA

SEQ ID NO: 24 - protein, 199 aa, Artificial Sequence
  derived and/or modified protein sequence (wt) from Homo sapiens__ENST00000561176.5__CD276
MRVRVADEGSFTCFVSIRDFGSAAVSLQVAAPYSKPSMTLEPNKDLRPGDTVTITCSSYRGYPEAEVFWQDGQGVPLTGNVTTSQMANEQGLFDVHSVLRVVLGANGTYSCLVRNPVLQQDAHGSVTITEALWVTVGLSVCLIALLVALAFVCWRKIKQSCEEENAGAEDQDGEGEGSKTALQPLKHSDSKEDDGQEIA

SEQ ID NO: 25 - protein, 170 aa, Artificial Sequence
  derived and/or modified protein sequence (wt) from Homo sapiens__ENST00000559073.1__CD276
MTLEPNKDLRPGDTVTITCSSYRGYPEAEVFWQDGQGVPLTGNVTTSQMANEQGLFDVHSVLRVVLGANGTYSCLVRNPVLQQDAHGSVTITGQPMTFPPEALWVTVGLSVCLIALLVALAFVCWRKIKQSCEEENAGAEDQDGEGEGSKTALQPLKHSDSKEDDGQEIA

SEQ ID NO: 26 - protein, 38 aa, Artificial Sequence
  derived and/or modified protein sequence (wt) from Homo sapiens__ENST00000560928.5__CD276
MLRRRGSPGMGVHVGAALGALWFCLTADRYQTAGAQLC

SEQ ID NO: 27 - protein, 128 aa, Artificial Sequence
  derived and/or modified protein sequence (wt) from Homo sapiens__ENST00000642928.1__CD59
MGIQGGSVLFGLLLVLAVFCHSGHSLQCYNCPNPTADCKTAVNCSSDFDACLITKAGLQVYNKCWKFEHCNFNDVTTRLRENELTYYCCKKDLCNFNEQLENGGTSLSEKTVLLLVTPFLAAAWSLHP

SEQ ID NO: 28 - protein, 119 aa, Artificial Sequence
  derived and/or modified protein sequence (wt) from Homo sapiens__ENST00000533403.6__CD59
MGIQGGSVLFGLLLVLAVFCHSGHSLQCYNCPNPTADCKTAVNCSSDFDACLITKAELGYHYVAQAGRRQSSHFSLLKCWDYRCEPSHWPHCPYFNWGYKCITSVGSLSIAISTTSQPA

SEQ ID NO: 29 - protein, 260 aa, Artificial Sequence
  derived and/or modified protein sequence (wt) from Homo sapiens__ENST00000592860.2__CFD
MHSWERLAVLVLLGAAACGEEAWAWAAPPRGRILGGREAEAHARPYMASVQLNGAHLCGGVLVAEQWVLSAAHCLEDAADGKVQVLLGAHSLSQPEPSKRLYDVLRAVPHPDSQPDTIDHDLLLLQLSEKATLGPAVRPLPWQRVDRDVAPGTLCDVAGWGIVNHAGRRPDSLQHVLLPVLDRATCNRRTHHDGAITERLMCAESNRRDSCKGDSGGPLVCGGVLEGVVTSGSRVCGNRKKPGIYTRVASYAAWIDSVLA

SEQ ID NO: 30 - protein, 253 aa, Artificial Sequence
  derived and/or modified protein sequence (wt) from Homo sapiens__ENST00000327726.10__CFD
MHSWERLAVLVLLGAAACAAPPRGRILGGREAEAHARPYMASVQLNGAHLCGGVLVAEQWVLSAAHCLEDAADGKVQVLLGAHSLSQPEPSKRLYDVLRAVPHPDSQPDTIDHDLLLLQLSEKATLGPAVRPLPWQRVDRDVAPGTLCDVAGWGIVNHAGRRPDSLQHVLLPVLDRATCNRRTHHDGAITERLMCAESNRRDSCKGDSGGPLVCGGVLEGVVTSGSRVCGNRKKPGIYTRVASYAAWIDSVLA

SEQ ID NO: 31 - protein, 653 aa, Artificial Sequence
  derived and/or modified protein sequence (wt) from Homo sapiens__ENST00000357749.6__CHM
MADTLPSEFDVIVIGTGLPESIIAAACSRSGRRVLHVDSRSYYGGNWASFSFSGLLSWLKEYQENSDIVSDSPVWQDQILENEEAIALSRKDKTIQHVEVFCYASQDLHEDVEEAGALQKNHALVTSANSTEAADSAFLPTEDESLSTMSCEMLTEQTPSSDPENALEVNGAEVTGEKENHCDDKTCVPSTSAEDMSENVPIAEDTTEQPKKNRITYSQIIKEGRRFNIDLVSKLLYSRGLLIDLLIKSNVSRYAEFKNITRILAFREGRVEQVPCSRADVFNSKQLTMVEKRMLMKFLTFCMEYEKYPDEYKGYEEITFYEYLKTQKLTPNLQYIVMHSIAMTSETASSTIDGLKATKNFLHCLGRYGNTPFLFPLYGQGELPQCFCRMCAVFGGIYCLRHSVQCLVVDKESRKCKAIIDQFGQRIISEHFLVEDSYFPENMCSRVQYRQISRAVLITDRSVLKTDSDQQISILTVPAEEPGTFAVRVIELCSSTMTCMKGTYLVHLTCTSSKTAREDLESVVQKLFVPYTEMEIENEQVEKPRILWALYFNMRDSSDISRSCYNDLPSNVYVCSGPDCGLGNDNAVKQAETLFQEICPNEDFCPPPPNPEDIILDGDSLQPEASESSAIPEANSETFKESTNLGNLEESSE

SEQ ID NO: 32 - protein, 110 aa, Artificial Sequence
  derived and/or modified protein sequence (wt) from Homo sapiens__ENST00000615443.1__CHM
MADTLPSEFDVIVIGTGLPESIIAAACSRSGRRVLHVDSRSYYGGNWASFSFSGLLSWLKEYQENSDIVSDSPVWQDQILENEEAIALSRKDKTIQHVEVFCYARSTLLL

SEQ ID NO: 33 - protein, 386 aa, Artificial Sequence
  derived and/or modified protein sequence (wt) from Homo sapiens__ENST00000539698.3__CHST4
MLLPKKMKLLLFLVSQMAILALFFHMYSHNISSLSMKAQPERMHVLVLSSWRSGSSFVGQLFGQHPDVFYLMEPAWHVWMTFKQSTAWMLHMAVRDLIRAVFLCDMSVFDAYMEPGPRRQSSLFQWENSRALCSAPACDIIPQDEIIPRAHCRLLCSQQPFEVVEKACRSYSHVVLKEVRFFNLQSLYPLLKDPSLNLHIVHLVRDPRAVFRSRERTKGDLMIDSRIVMGQHEQKLKKEDQPYYVMQVICQSQLEIYKTIQSLPKALQERYLLVRYEDLARAPVAQTSRMYEFVGLEFLPHLQTWVHNITRGKGMGDHAFHTNARDALNVSQAWRWSLPYEKVSRLQKACGDAMNLLGYRHVRSEQEQRNLLLDLLSTWTVPEQIH

SEQ ID NO: 34 - protein, 472 aa, Artificial Sequence
  derived and/or modified protein sequence (wt) from Homo sapiens__ENST00000369501.2__CNR1
MKSILDGLADTTFRTITTDLLYVGSNDIQYEDIKGDMASKLGYFPQKFPLTSFRGSPFQEKMTAGDNPQLVPADQVNITEFYNKSLSSFKENEENIQCGENFMDIECFMVLNPSQQLAIAVLSLTLGTFTVLENLLVLCVILHSRSLRCRPSYHFIGSLAVADLLGSVIFVYSFIDFHVFHRKDSRNVFLFKLGGVTASFTASVGSLFLTAIDRYISIHRPLAYKRIVTRPKAVVAFCLMWTIAIVIAVLPLLGWNCEKLQSVCSDIFPHIDETYLMFWIGVTSVLLLFIVYAYMYILWKAHSHAVRMIQRGTQKSIIIHTSEDGKVQVTRPDQARMDIRLAKTLVLILVVLIICWGPLLAIMVYDVFGKMNKLIKTVFAFCSMLCLLNSTVNPIIYALRSKDLRHAFRSMFPSCEGTAQPLDNSMGDSDCLHKHANNAASVHRAAESCIKSTVKIAKVTMSVSTDTSAEAL

SEQ ID NO: 35 - protein, 439 aa, Artificial Sequence
  derived and/or modified protein sequence (wt) from Homo sapiens__ENST00000468898.1__CNR1
MKSILDGLADTTFRTITTDLLGSPFQEKMTAGDNPQLVPADQVNITEFYNKSLSSFKENEENIQCGENFMDIECFMVLNPSQQLAIAVLSLTLGTFTVLENLLVLCVILHSRSLRCRPSYHFIGSLAVADLLGSVIFVYSFIDFHVFHRKDSRNVFLFKLGGVTASFTASVGSLFLTAIDRYISIHRPLAYKRIVTRPKAVVAFCLMWTIAIVIAVLPLLGWNCEKLQSVCSDIFPHIDETYLMFWIGVTSVLLLFIVYAYMYILWKAHSHAVRMIQRGTQKSIIIHTSEDGKVQVTRPDQARMDIRLAKTLVLILVVLIICWGPLLAIMVYDVFGKMNKLIKTVFAFCSMLCLLNSTVNPIIYALRSKDLRHAFRSMFPSCEGTAQPLDNSMGDSDCLHKHANNAASVHRAAESCIKSTVKIAKVTMSVSTDTSAEAL

SEQ ID NO: 36 - protein, 36 aa, Artificial Sequence
  derived and/or modified protein sequence (wt) from Homo sapiens__ENST00000362094.5__CNR1
MKSILDGLADTTFRTITTDLLYVGSNDIQYEDIKGE

SEQ ID NO: 37 - protein, 200 aa, Artificial Sequence
  derived and/or modified protein sequence (wt) from Homo sapiens__ENST00000361987.5__CNTF
MAFTEHSPLTPHRRDLCSRSIWLARKIRSDLTALTESYVKHQGLNKNINLDSADGMPVASTDQWSELTEAERLQENLQAYRTFHVLLARLLEDQQVHFTPTEGDFHQAIHTLLLQVAAFAYQIEELMILLEYKIPRNEADGMPINVGDGGLFEKKLWGLKVLQELSQWTVRSIHDLRFISSHQTGIPARGSHYIANNKKM

SEQ ID NO: 38 - protein, 173 aa, Artificial Sequence
  derived and/or modified protein sequence (wt) from Homo sapiens__ENST00000291554.6__CRYAA
MDVTIQHPWFKRTLGPFYPSRLFDQFFGEGLFEYDLLPFLSSTISPYYRQSLFRTVLDSGISEVRSDRDKFVIFLDVKHFSPEDLTVKVQDDFVEIHGKHNERQDDHGYISREFHRRYRLPSNVDQSALSCSLSADGMLTFCGPKIQTGLDATHAERAIPVSREEKPTSAPSS

SEQ ID NO: 39 - protein, 153 aa, Artificial Sequence
  derived and/or modified protein sequence (wt) from Homo sapiens__ENST00000398133.5__CRYAA
MSSACPRLAKLLASLLRCPAKAKRTGNGRPPPHPTTGLLSEPRVRSDRDKFVIFLDVKHFSPEDLTVKVQDDFVEIHGKHNERQDDHGYISREFHRRYRLPSNVDQSALSCSLSADGMLTFCGPKIQTGLDATHAERAIPVSREEKPTSAPSS

SEQ ID NO: 40 - protein, 136 aa, Artificial Sequence
  derived and/or modified protein sequence (wt) from Homo sapiens__ENST00000398132.1__CRYAA
MPVCPGDSHRPPKALPHLVCGRRGRQVRSDRDKFVIFLDVKHFSPEDLTVKVQDDFVEIHGKHNERQDDHGYISREFHRRYRLPSNVDQSALSCSLSADGMLTFCGPKIQTGLDATHAERAIPVSREEKPTSAPSS

SEQ ID NO: 41 - protein, 175 aa, Artificial Sequence
  derived and/or modified protein sequence (wt) from Homo sapiens__ENST00000616970.4__CRYAB
MDIAIHHPWIRRPFFPFHSPSRLFDQFFGEHLLESDLFPTSTSLSPFYLRPPSFLRAPSWFDTGLSEMRLEKDRFSVNLDVKHFSPEELKVKVLGDVIEVHGKHEERQDEHGFISREFHRKYRIPADVDPLTITSSLSSDGVLTVNGPRKQVSGPERTIPITREEKPAVTAAPKK

SEQ ID NO: 42 - protein, 155 aa, Artificial Sequence
  derived and/or modified protein sequence (wt) from Homo sapiens__ENST00000533971.1__CRYAB
MDIAIHHPWIRRPFFPFHSPSRLFDQFFGEHLLESDLFPTSTSLSPFYLRPPSFLRAPSWFDTGLSEMRLEKDRFSVNLDVKHFSPEELKVKVLGDVIEVHGKHEERQVCSLFFCFLLIHSVHTVIVQVVLSALEAGYIPVPSHNSRDQGLQINV

SEQ ID NO: 43 - protein, 108 aa, Artificial Sequence
  derived and/or modified protein sequence (wt) from Homo sapiens__ENST00000533280.5__CRYAB
MRLEKDRFSVNLDVKHFSPEELKVKVLGDVIEVHGKHEERQDEHGFISREFHRKYRIPADVDPLTITSSLSSDGVLTVNGPRKQVSGPERTIPITREEKPAVTAAPKK

SEQ ID NO: 44 - protein, 863 aa, Artificial Sequence
  derived and/or modified protein sequence (wt) from Homo sapiens__ENST00000373103.5__CSF3R
MARLGNCSLTWAALIILLLPGSLEECGHISVSAPIVHLGDPITASCIIKQNCSHLDPEPQILWRLGAELQPGGRQQRLSDGTQESIITLPHLNHTQAFLSCCLNWGNSLQILDQVELRAGYPPAIPHNLSCLMNLTTSSLICQWEPGPETHLPTSFTLKSFKSRGNCQTQGDSILDCVPKDGQSHCCIPRKHLLLYQNMGIWVQAENALGTSMSPQLCLDPMDVVKLEPPMLRTMDPSPEAAPPQAGCLQLCWEPWQPGLHINQKCELRHKPQRGEASWALVGPLPLEALQYELCGLLPATAYTLQIRCIRWPLPGHWSDWSPSLELRTTERAPTVRLDTWWRQRQLDPRTVQLFWKPVPLEEDSGRIQGYVVSWRPSGQAGAILPLCNTTELSCTFHLPSEAQEVALVAYNSAGTSRPTPVVFSESRGPALTRLHAMARDPHSLWVGWEPPNPWPQGYVIEWGLGPPSASNSNKTWRMEQNGRATGFLLKENIRPFQLYEIIVTPLYQDTMGPSQHVYAYSQEMAPSHAPELHLKHIGKTWAQLEWVPEPPELGKSPLTHYTIFWTNAQNQSFSAILNASSRGFVLHGLEPASLYHIHLMAASQAGATNSTVLTLMTLTPEGSELHIILGLFGLLLLLTCLCGTAWLCCSPNRKNPLWPSVPDPAHSSLGSWVPTIMEELPGPRQGQWLGQTSEMSRALTPHPCVQDAFQLPGLGTPPITKLTVLEEDEKKPVPWESHNSSETCGLPTLVQTYVLQGDPRAVSTQPQSQSGTSDQVLYGQLLGSPTSPGPGHYLRCDSTQPLLAGLTPSPKSYENLWFQASPLGTLVTPAPSQEDDCVFGPLLNFPLLQGIRVHGMEALGSF

SEQ ID NO: 45 - protein, 836 aa, Artificial Sequence
  derived and/or modified protein sequence (wt) from Homo sapiens__ENST00000373106.5__CSF3R
MARLGNCSLTWAALIILLLPGSLEECGHISVSAPIVHLGDPITASCIIKQNCSHLDPEPQILWRLGAELQPGGRQQRLSDGTQESIITLPHLNHTQAFLSCCLNWGNSLQILDQVELRAGYPPAIPHNLSCLMNLTTSSLICQWEPGPETHLPTSFTLKSFKSRGNCQTQGDSILDCVPKDGQSHCCIPRKHLLLYQNMGIWVQAENALGTSMSPQLCLDPMDVVKLEPPMLRTMDPSPEAAPPQAGCLQLCWEPWQPGLHINQKCELRHKPQRGEASWALVGPLPLEALQYELCGLLPATAYTLQIRCIRWPLPGHWSDWSPSLELRTTERAPTVRLDTWWRQRQLDPRTVQLFWKPVPLEEDSGRIQGYVVSWRPSGQAGAILPLCNTTELSCTFHLPSEAQEVALVAYNSAGTSRPTPVVFSESRGPALTRLHAMARDPHSLWVGWEPPNPWPQGYVIEWGLGPPSASNSNKTWRMEQNGRATGFLLKENIRPFQLYEIIVTPLYQDTMGPSQHVYAYSQEMAPSHAPELHLKHIGKTWAQLEWVPEPPELGKSPLTHYTIFWTNAQNQSFSAILNASSRGFVLHGLEPASLYHIHLMAASQAGATNSTVLTLMTLTPEGSELHIILGLFGLLLLLTCLCGTAWLCCSPNRKNPLWPSVPDPAHSSLGSWVPTIMEEDAFQLPGLGTPPITKLTVLEEDEKKPVPWESHNSSETCGLPTLVQTYVLQGDPRAVSTQPQSQSGTSDQVLYGQLLGSPTSPGPGHYLRCDSTQPLLAGLTPSPKSYENLWFQASPLGTLVTPAPSQEDDCVFGPLLNFPLLQGIRVHGMEALGSF

SEQ ID NO: 46 - protein, 783 aa, Artificial Sequence
  derived and/or modified protein sequence (wt) from Homo sapiens__ENST00000373104.5__CSF3R
MARLGNCSLTWAALIILLLPGSLEECGHISVSAPIVHLGDPITASCIIKQNCSHLDPEPQILWRLGAELQPGGRQQRLSDGTQESIITLPHLNHTQAFLSCCLNWGNSLQILDQVELRAGYPPAIPHNLSCLMNLTTSSLICQWEPGPETHLPTSFTLKSFKSRGNCQTQGDSILDCVPKDGQSHCCIPRKHLLLYQNMGIWVQAENALGTSMSPQLCLDPMDVVKLEPPMLRTMDPSPEAAPPQAGCLQLCWEPWQPGLHINQKCELRHKPQRGEASWALVGPLPLEALQYELCGLLPATAYTLQIRCIRWPLPGHWSDWSPSLELRTTERAPTVRLDTWWRQRQLDPRTVQLFWKPVPLEEDSGRIQGYVVSWRPSGQAGAILPLCNTTELSCTFHLPSEAQEVALVAYNSAGTSRPTPVVFSESRGPALTRLHAMARDPHSLWVGWEPPNPWPQGYVIEWGLGPPSASNSNKTWRMEQNGRATGFLLKENIRPFQLYEIIVTPLYQDTMGPSQHVYAYSQEMAPSHAPELHLKHIGKTWAQLEWVPEPPELGKSPLTHYTIFWTNAQNQSFSAILNASSRGFVLHGLEPASLYHIHLMAASQAGATNSTVLTLMTLTPEGSELHIILGLFGLLLLLTCLCGTAWLCCSPNRKNPLWPSVPDPAHSSLGSWVPTIMEEDAFQLPGLGTPPITKLTVLEEDEKKPVPWESHNSSETCGLPTLVQTYVLQGDPRAVSTQPQSQSGTSDQAGPPRRSAYFKDQIMLHPAPPNGLLCLFPITSVL

SEQ ID NO: 47 - protein, 359 aa, Artificial Sequence
  derived and/or modified protein sequence (wt) from Homo sapiens__ENST00000052754.9__DCN
MKATIILLLLAQVSWAGPFQQRGLFDFMLEDEASGIGPEVPDDRDFEPSLGPVCPFRCQCHLRVVQCSDLGLDKVPKDLPPDTTLLDLQNNKITEIKDGDFKNLKNLHALILVNNKISKVSPGAFTPLVKLERLYLSKNQLKELPEKMPKTLQELRAHENEITKVRKVTFNGLNQMIVIELGTNPLKSSGIENGAFQGMKKLSYIRIADTNITSIPQGLPPSLTELHLDGNKISRVDAASLKGLNNLAKLGLSFNSISAVDNGSLANTPHLRELHLDNNKLTRVPGGLAEHKYIQVVYLHNNNISVVGSSDFCPPGHNTKKASYSGVSLFSNPVQYWEIQPSTFRCVYVRSAIQLGNYK

SEQ ID NO: 48 - protein, 250 aa, Artificial Sequence
  derived and/or modified protein sequence (wt) from Homo sapiens__ENST00000420120.6__DCN
MKATIILLLLAQVSWAGPFQQRGLFDFMLEDEASGIGPEVPDDRDFEPSLGPVCPFRCQCHLRVVQCSDLELGTNPLKSSGIENGAFQGMKKLSYIRIADTNITSIPQGLPPSLTELHLDGNKISRVDAASLKGLNNLAKLGLSFNSISAVDNGSLANTPHLRELHLDNNKLTRVPGGLAEHKYIQVVYLHNNNISVVGSSDFCPPGHNTKKASYSGVSLFSNPVQYWEIQPSTFRCVYVRSAIQLGNYK

SEQ ID NO: 49 - protein, 212 aa, Artificial Sequence
  derived and/or modified protein sequence (wt) from Homo sapiens__ENST00000425043.5__DCN
MKATIILLLLAQVSWAGPFQQRGLFDFMLEDEASGIGPEVPDDRDFEPSLGPVCPFRCQCHLRVVQCSDLGLPPSLTELHLDGNKISRVDAASLKGLNNLAKLGLSFNSISAVDNGSLANTPHLRELHLDNNKLTRVPGGLAEHKYIQVVYLHNNNISVVGSSDFCPPGHNTKKASYSGVSLFSNPVQYWEIQPSTFRCVYVRSAIQLGNYK

SEQ ID NO: 50 - protein, 172 aa, Artificial Sequence
  derived and/or modified protein sequence (wt) from Homo sapiens__ENST00000441303.6__DCN
MKATIILLLLAQVSWAGPFQQRGLFDFMLEDEASGIGPEVPDDRDFEPSLGPVCPFRCQCHLRVVQCSDLGLDKVPKDLPPDTTLLDLQNNKITEIKDGDFKNLKNLHVVYLHNNNISVVGSSDFCPPGHNTKKASYSGVSLFSNPVQYWEIQPSTFRCVYVRSAIQLGNYK

SEQ ID NO: 51 - protein, 100 aa, Artificial Sequence
  derived and/or modified protein sequence (wt) from Homo sapiens__ENST00000551354.1__DCN
MKATIILLLLAQVSWAGPFQQRGLFDFMLEDEASGIGPEVPDDRDFEPSLGPVCPFRCQCHLRVVQCSDLEKFGLEIPRALHLEDKSPERLKLSGWAKGE

SEQ ID NO: 52 - protein, 98 aa, Artificial Sequence
  derived and/or modified protein sequence (wt) from Homo sapiens__ENST00000546745.5__DCN
MKATIILLLLAQVSWAGPFQQRGLFDFMLEDEASGIGPEVPDDRDFEPSLGPVCPFRCQCHLRVVQCSDLEKKYCNNLSSYNLYTTNCLILCRLFTHH

SEQ ID NO: 53 - protein, 88 aa, Artificial Sequence
  derived and/or modified protein sequence (wt) from Homo sapiens__ENST00000546370.5__DCN
MKATIILLLLAQVSWAGPFQQRGLFDFMLEDEASGIGPEVPDDRDFEPSLGPVCPFRCQCHLRVVQCSDLVETGFHRVSQDGLDLLIS

SEQ ID NO: 54 - protein, 75 aa, Artificial Sequence
  derived and/or modified protein sequence (wt) from Homo sapiens__ENST00000456569.2__DCN
MKATIILLLLAQVSWAGPFQQRGLFDFMLEDEASGIGPEVPDDRDFEPSLGPVCPFRCQCHLRVVQCSDLGCLPS

SEQ ID NO: 55 - protein, 1922 aa, Artificial Sequence
  derived and/or modified protein sequence (wt) from Homo sapiens__ENST00000527414.5__DICER1
MKSPALQPLSMAGLQLMTPASSPMGPFFGLPWQQEAIHDNIYTPRKYQVELLEAALDHNTIVCLNTGSGKTFIAVLLTKELSYQIRGDFSRNGKRTVFLVNSANQVAQQVSAVRTHSDLKVGEYSNLEVNASWTKERWNQEFTKHQVLIMTCYVALNVLKNGYLSLSDINLLVFDECHLAILDHPYREIMKLCENCPSCPRILGLTASILNGKCDPEELEEKIQKLEKILKSNAETATDLVVLDRYTSQPCEIVVDCGPFTDRSGLYERLLMELEEALNFINDCNISVHSKERDSTLISKQILSDCRAVLVVLGPWCADKVAGMMVRELQKYIKHEQEELHRKFLLFTDTFLRKIHALCEEHFSPASLDLKFVTPKVIKLLEILRKYKPYERQQFESVEWYNNRNQDNYVSWSDSEDDDEDEEIEEKEKPETNFPSPFTNILCGIIFVERRYTAVVLNRLIKEAGKQDPELAYISSNFITGHGIGKNQPRNKQMEAEFRKQEEVLRKFRAHETNLLIATSIVEEGVDIPKCNLVVRFDLPTEYRSYVQSKGRARAPISNYIMLADTDKIKSFEEDLKTYKAIEKILRNKCSKSVDTGETDIDPVMDDDDVFPPYVLRPDDGGPRVTINTAIGHINRYCARLPSDPFTHLAPKCRTRELPDGTFYSTLYLPINSPLRASIVGPPMSCVRLAERVVALICCEKLHKIGELDDHLMPVGKETVKYEEELDLHDEEETSVPGRPGSTKRRQCYPKAIPECLRDSYPRPDQPCYLYVIGMVLTTPLPDELNFRRRKLYPPEDTTRCFGILTAKPIPQIPHFPVYTRSGEVTISIELKKSGFMLSLQMLELITRLHQYIFSHILRLEKPALEFKPTDADSAYCVLPLNVVNDSSTLDIDFKFMEDIEKSEARIGIPSTKYTKETPFVFKLEDYQDAVIIPRYRNFDQPHRFYVADVYTDLTPLSKFPSPEYETFAEYYKTKYNLDLTNLNQPLLDVDHTSSRLNLLTPRHLNQKGKALPLSSAEKRKAKWESLQNKQILVPELCAIHPIPASLWRKAVCLPSILYRLHCLLTAEELRAQTASDAGVGVRSLPADFRYPNLDFGWKKSIDSKSFISISNSSSAENDNYCKHSTIVPENAAHQGANRTSSLENHDQMSVNCRTLLSESPGKLHVEVSADLTAINGLSYNQNLANGSYDLANRDFCQGNQLNYYKQEIPVQPTTSYSIQNLYSYENQPQPSDECTLLSNKYLDGNANKSTSDGSPVMAVMPGTTDTIQVLKGRMDSEQSPSIGYSSRTLGPNPGLILQALTLSNASDGFNLERLEMLGDSFLKHAITTYLFCTYPDAHEGRLSYMRSKKVSNCNLYRLGKKKGLPSRMVVSIFDPPVNWLPPGYVVNQDKSNTDKWEKDEMTKDCMLANGKLDEDYEEEDEEEESLMWRAPKEEADYEDDFLEYDQEHIRFIDNMLMGSGAFVKKISLSPFSTTDSAYEWKMPKKSSLGSMPFSSDFEDFDYSSWDAMCYLDPSKAVEEDDFVVGFWNPSEENCGVDTGKQSISYDLHTEQCIADKSIADCVEALLGCYLTSCGERAAQLFLCSLGLKVLPVIKRTDREKALCPTRENFNSQQKNLSVSCAAASVASSRSSVLKDSEYGCLKIPPRCMFDHPDADKTLNHLISGFENFEKKINYRFKNKAYLLQAFTHASYHYNTITDCYQRLEFLGDAILDYLITKHLYEDPRQHSPGVLTDLRSALVNNTIFASLAVKYDYHKYFKAVSPELFHVIDDFVQFQLEKNEMQGMDSELRRSEEDEEKEEDIEVPKAMGDIFESLAGAIYMDSGMSLETVWQVYYPMMRPLIEKFSANVPRSPVRELLEMEPETAKFSPAERTYDGKVRVTVEVVGKGKFKGVGRSYRIAKSAAARRALRSLKANQPQVPNS

SEQ ID NO: 56 - protein, 1829 aa, Artificial Sequence
  derived and/or modified protein sequence (wt) from Homo sapiens__ENST00000541352.5__DICER1
MKSPALQPLSMAGLQLMTPASSPMGPFFGLPWQQEAIHDNIYTPRKYQVELLEAALDHNTIVCLNTGSGKTFIAVLLTKELSYQIRGDFSRNGKRTVFLVNSANQVAQQVSAVRTHSDLKVGEYSNLEVNASWTKERWNQEFTKHQVLIMTCYVALNVLKNGYLSLSDINLLVFDECHLAILDHPYREIMKLCENCPSCPRILGLTASILNGKCDPEELEEKIQKLEKILKSNAETATDLVVLDRYTSQPCEIVVDCGPFTDRSGLYERLLMELEEALNFINDCNISVHSKERDSTLISKQILSDCRAVLVVLGPWCADKVAGMMVRELQKYIKHEQEELHRKFLLFTDTFLRKIHALCEEHFSPASLDLKFVTPKVIKLLEILRKYKPYERQQFESVEWYNNRNQDNYVSWSDSEDDDEDEEIEEKEKPETNFPSPFTNILCGIIFVERRYTAVVLNRLIKEAGKQDPELAYISSNFITGHGIGKNQPRNKQMEAEFRKQEEVLRKFRAHETNLLIATSIVEEGVDIPKCNLVVRFDLPTEYRSYVQSKGRARAPISNYIMLADTDKIKSFEEDLKTYKAIEKILRNKCSKSVDTGETDIDPVMDDDDVFPPYVLRPDDGGPRVTINTAIGHINRYCARLPSDPFTHLAPKCRTRELPDGTFYSTLYLPINSPLRASIVGPPMSCVRLAERVVALICCEKLHKIGELDDHLMPVGKETVKYEEELDLHDEEETSVPGRPGSTKRRQCYPKAIPECLRDSYPRPDQPCYLYVIGMVLTTPLPDELNFRRRKLYPPEDTTRCFGILTAKPIPQIPHFPVYTRSGEVTISIELKKSGFMLSLQMLELITRLHQYIFSHILRLEKPALEFKPTDADSAYCVLPLNVVNDSSTLDIDFKFMEDIEKSEARIGIPSTKYTKETPFVFKLEDYQDAVIIPRYRNFDQPHRFYVADVYTDLTPLSKFPSPEYETFAEYYKTKYNLDLTNLNQPLLDVDHTSSRLNLLTPRHLNQKGKALPLSSAEKRKAKWESLQNKQILVPELCAIHPIPASLWRKAVCLPSILYRLHCLLTAEELRAQTASDAGVGVRSLPADFRYPNLDFGWKKSIDSKSFISISNSSSAENDNYCKHSTIVPENAAHQGANRTSSLENHDQMSVNCRTLLSESPGKLHVEVSADLTAINGLSYNQNLANGSYDLANRDFCQGNQLNYYKQEIPVQPTTSYSIQNLYSYENQPQPSDECTLLSNKYLDGNANKSTSDGSPVMAVMPGTTDTIQVLKGRMDSEQSPSIGYSSRTLGPNPGLILQALTLSNASDGFNLERLEMLGDSFLKHAITTYLFCTYPDAHEGRLSYMRSKKVSNCNLYRLGKKKGLPSRMVVSIFDPPVNWLPPGYVVNQDKSNTDKWEKDEMTKDCMLANGKLDEDYEEEDEEEESLMWRAPKEEADYEDDFLEYDQEHIRFIDNMLMGSGAFVKKISLSPFSTTDSAYEWKMPKKSSLGSMPFSSDFEDFDYSSWDAMCYLDPSKAVEEDDFVVGFWNPSEENCGVDTGKQSISYDLHTEQCIADKSIADCVEALLGCYLTSCGERAAQLFLCSLGLKVLPVIKRTDREKALCPTRENFNSQQKNLSVSCAAASVASSRSSVLKDSEYGCLKIPPRCMFDHPDADKTLNHLISGFENFEKKINYRFKNKAYLLQAFTHASYHYNTITDCYQRLEFLGDAILDYLITKHLYEDPRQHSPGVLTDLRSALVNNTIFASLAVKYDYHKYFKAVSPELFHVIDDFVQFQLEKNEMQGMDSEKSFLQMYPVPLCENCLKWNQKLPNLARLRELTTGRSESLWK

SEQ ID NO: 57 - protein, 820 aa, Artificial Sequence
  derived and/or modified protein sequence (wt) from Homo sapiens__ENST00000556045.5__DICER1
MLAWESDHFLRILAENDNYCKHSTIVPENAAHQGANRTSSLENHDQMSVNCRTLLSESPGKLHVEVSADLTAINGLSYNQNLANGSYDLANRDFCQGNQLNYYKQEIPVQPTTSYSIQNLYSYENQPQPSDECTLLSNKYLDGNANKSTSDGSPVMAVMPGTTDTIQVLKGRMDSEQSPSIGYSSRTLGPNPGLILQALTLSNASDGFNLERLEMLGDSFLKHAITTYLFCTYPDAHEGRLSYMRSKKVSNCNLYRLGKKKGLPSRMVVSIFDPPVNWLPPGYVVNQDKSNTDKWEKDEMTKDCMLANGKLDEDYEEEDEEEESLMWRAPKEEADYEDDFLEYDQEHIRFIDNMLMGSGAFVKKISLSPFSTTDSAYEWKMPKKSSLGSMPFSSDFEDFDYSSWDAMCYLDPSKAVEEDDFVVGFWNPSEENCGVDTGKQSISYDLHTEQCIADKSIADCVEALLGCYLTSCGERAAQLFLCSLGLKVLPVIKRTDREKALCPTRENFNSQQKNLSVSCAAASVASSRSSVLKDSEYGCLKIPPRCMFDHPDADKTLNHLISGFENFEKKINYRFKNKAYLLQAFTHASYHYNTITDCYQRLEFLGDAILDYLITKHLYEDPRQHSPGVLTDLRSALVNNTIFASLAVKYDYHKYFKAVSPELFHVIDDFVQFQLEKNEMQGMDSELRRSEEDEEKEEDIEVPKAMGDIFESLAGAIYMDSGMSLETVWQVYYPMMRPLIEKFSANVPRSPVRELLEMEPETAKFSPAERTYDGKVRVTVEVVGKGKFKGVGRSYRIAKSAAARRALRSLKANQPQVPNS

SEQ ID NO: 58 - protein, 445 aa, Artificial Sequence
  derived and/or modified protein sequence (wt) from Homo sapiens__ENST00000538967.5__DRD2
MDPLNLSWYDDDLERQNWSRPFNGSDGKADRPHYNYYATLLTLLIAVIVFGNVLVCMAVSREKALQTTTNYLIVSLAVADLLVATLVMPWVVYLEVVGEWKFSRIHCDIFVTLDVMMCTASILNLCAISIDRYTAVAMPMLYNTRYSSKRRVTVMISIVWVLSFTISCPLLFGLNNADQNECIIANPAFVVYSSIVSFYVPFIVTLLVYIKIYIVLRRRRKRVNTKRSSRAFRAHLRAPLKGNCTHPEDMKLCTVIMKSNGSFPVNRRRVVQEAARRAQELEMEMLSSTSPPERTRYSPIPPSHHQLTLPDPSHHGLHSTPDSPAKPEKNGHAKDHPKIAKIFEIQTMPNGKTRTSLKTMSRRKLSQQKEKKATQMLAIVLGVFIICWLPFFITHILNIHCDCNIPPVLYSAFTWLGYVNSAVNPIIYTTFNIEFRKAFLKILHC

SEQ ID NO: 59 - protein, 443 aa, Artificial Sequence
  derived and/or modified protein sequence (wt) from Homo sapiens__ENST00000362072.7__DRD2
MDPLNLSWYDDDLERQNWSRPFNGSDGKADRPHYNYYATLLTLLIAVIVFGNVLVCMAVSREKALQTTTNYLIVSLAVADLLVATLVMPWVVYLEVVGEWKFSRIHCDIFVTLDVMMCTASILNLCAISIDRYTAVAMPMLYNTRYSSKRRVTVMISIVWVLSFTISCPLLFGLNNADQNECIIANPAFVVYSSIVSFYVPFIVTLLVYIKIYIVLRRRRKRVNTKRSSRAFRAHLRAPLKGNCTHPEDMKLCTVIMKSNGSFPVNRRRVEAARRAQELEMEMLSSTSPPERTRYSPIPPSHHQLTLPDPSHHGLHSTPDSPAKPEKNGHAKDHPKIAKIFEIQTMPNGKTRTSLKTMSRRKLSQQKEKKATQMLAIVLGVFIICWLPFFITHILNIHCDCNIPPVLYSAFTWLGYVNSAVNPIIYTTFNIEFRKAFLKILHC

SEQ ID NO: 60 - protein, 442 aa, Artificial Sequence
  derived and/or modified protein sequence (wt) from Homo sapiens__ENST00000544518.5__DRD2
MDPLNLSWYDDDLERQNWSRPFNGSDGKADRPHYNYYATLLTLLIAVIVFGNVLVCMAVSREKALQTTTNYLIVSLAVADLLVATLVMPWVVYLEVGEWKFSRIHCDIFVTLDVMMCTASILNLCAISIDRYTAVAMPMLYNTRYSSKRRVTVMISIVWVLSFTISCPLLFGLNNADQNECIIANPAFVVYSSIVSFYVPFIVTLLVYIKIYIVLRRRRKRVNTKRSSRAFRAHLRAPLKGNCTHPEDMKLCTVIMKSNGSFPVNRRRVEAARRAQELEMEMLSSTSPPERTRYSPIPPSHHQLTLPDPSHHGLHSTPDSPAKPEKNGHAKDHPKIAKIFEIQTMPNGKTRTSLKTMSRRKLSQQKEKKATQMLAIVLGVFIICWLPFFITHILNIHCDCNIPPVLYSAFTWLGYVNSAVNPIIYTTFNIEFRKAFLKILHC

SEQ ID NO: 61 - protein, 414 aa, Artificial Sequence
  derived and/or modified protein sequence (wt) from Homo sapiens__ENST00000346454.7__DRD2
MDPLNLSWYDDDLERQNWSRPFNGSDGKADRPHYNYYATLLTLLIAVIVFGNVLVCMAVSREKALQTTTNYLIVSLAVADLLVATLVMPWVVYLEVVGEWKFSRIHCDIFVTLDVMMCTASILNLCAISIDRYTAVAMPMLYNTRYSSKRRVTVMISIVWVLSFTISCPLLFGLNNADQNECIIANPAFVVYSSIVSFYVPFIVTLLVYIKIYIVLRRRRKRVNTKRSSRAFRAHLRAPLKEAARRAQELEMEMLSSTSPPERTRYSPIPPSHHQLTLPDPSHHGLHSTPDSPAKPEKNGHAKDHPKIAKIFEIQTMPNGKTRTSLKTMSRRKLSQQKEKKATQMLAIVLGVFIICWLPFFITHILNIHCDCNIPPVLYSAFTWLGYVNSAVNPIIYTTFNIEFRKAFLKILHC

SEQ ID NO: 62 - protein, 1210 aa, Artificial Sequence [sequence omitted]

SEQ ID NO: 63 - protein, 1165 aa, Artificial Sequence
  derived and/or modified protein sequence (wt) from Homo sapiens__ENST00000454757.6__EGFR
MRPSGTAGAALLALLAALCPASRALEEKKVCQGTSNKLTQLGTFEDHFLSLQRMFNNCEVVLGNLEITYVQRNYDLSFLKTIQEVAGYVLIALNTVERIPLENLQIIRGNMYYENSYALAVLSNYDANKTGLKELPMRNLQGQKCDPSCPNGSCWGAGEENCQKLTKIICAQQCSGRCRGKSPSDCCHNQCAAGCTGPRESDCLVCRKFRDEATCKDTCPPLMLYNPTTYQMDVNPEGKYSFGATCVKKCPRNYVVTDHGSCVRACGADSYEMEEDGVRKCKKCEGPCRKVCNGIGIGEFKDSLSINATNIKHFKNCTSISGDLHILPVAFRGDSFTHTPPLDPQELDILKTVKEITGFLLIQAWPENRTDLHAFENLEIIRGRTKQHGQFSLAVVSLNITSLGLRSLKEISDGDVIISGNKNLCYANTINWKKLFGTSGQKTKIISNRGENSCKATGQVCHALCSPEGCWGPEPRDCVSCRNVSRGRECVDKCNLLEGEPREFVENSECIQCHPECLPQAMNITCTGRGPDNCIQCAHYIDGPHCVKTCPAGVMGENNTLVWKYADAGHVCHLCHPNCTYGCTGPGLEGCPTNGPKIPSIATGMVGALLLLLVVALGIGLFMRRRHIVRKRTLRRLLQERELVEPLTPSGEAPNQALLRILKETEFKKIKVLGSGAFGTVYKGLWIPEGEKVKIPVAIKELREATSPKANKEILDEAYVMASVDNPHVCRLLGICLTSTVQLITQLMPFGCLLDYVREHKDNIGSQYLLNWCVQIAKGMNYLEDRRLVHRDLAARNVLVKTPQHVKITDFGLAKLLGAEEKEYHAEGGKVPIKWMALESILHRIYTHQSDVWSYGVTVWELMTFGSKPYDGIPASEISSILEKGERLPQPPICTIDVYMIMVKCWMIDADSRPKFRELIIEFSKMARDPQRYLVIQGDERMHLPSPTDSNFYRALMDEEDMDDVVDADEYLIPQQGFFSSPSTSRTPLLSSLSATSNNSTVACIDRNGLQSCPIKEDSFLQRYSSDPTGALTEDSIDDTFLPVPEYINQSVPKRPAGSVQNPVYHNQPLNPAPSRDPHYQDPHSTAVGNPEYLNTVQPTCVNSTFDSPAHWAQKGSHQISLDNPDYQQDFFPKEAKPNGIFKGSTAENAEYLRVAPQSSEFIGA

SEQ ID NO: 64 - protein, 1091 aa, Artificial Sequence
  derived and/or modified protein sequence (wt) from Homo sapiens__ENST00000455089.5__EGFR
MRPSGTAGAALLALLAALCPASRALEEKKVCQGTSNKLTQLGTFEDHFLSLQRMFNNCEVVLGNLEITYVQRNYDLSFLKTIQEVAGYVLIALNTVERIPLENLQIIRGNMYYENSYALAVLSNYDANKTGLKELPMRNLQGQKCDPSCPNGSCWGAGEENCQKLTKIICAQQCSGRCRGKSPSDCCHNQCAAGCTGPRESDCLVCRKFRDEATCKDTCPPLMLYNPTTYQMDVNPEGKYSFGATCVKKCPRNYVVTDHGSCVRACGADSYEMEEDGVRKCKKCEGPCRKVCNGIGIGEFKDSLSINATNIKHFKNCTSISGDLHILPVAFRGDSFTHTPPLDPQELDILKTVKEITGFLLIQAWPENRTDLHAFENLEIIRGRTKQHGQFSLAVVSLNITSLGLRSLKEISDGDVIISGNKNLCYANTINWKKLFGTSGQKTKIISNRGENSCKATGQVCHALCSPEGCWGPEPRDCVSCRNVSRGRECVDKCNLLEGEPREFVENSECIQCHPECLPQAMNITCTGRGPDNCIQCAHYIDGPHCVKTCPAGVMGENNTLVWKYADAGHVCHLCHPNCTYGCTGPGLEGCPTNGPKIPSIATGMVGALLLLLVVALGIGLFMRRRHIVRKRTLRRLLQERELVEPLTPSGEAPNQALLRILKETEFKKIKVLGSGAFGTVYKGLWIPEGEKVKIPVAIKELREATSPKANKEILDEAYVMASVDNPHVCRLLGICLTSTVQLITQLMPFGCLLDYVREHKDNIGSQYLLNWCVQIAKGMNYLEDRRLVHRDLAARNVLVKTPQHVKITDFGLAKLLGAEEKEYHAEGGKVPIKWMALESILHRIYTHQSDVWSYGVTVWELMTFGSKPYDGIPASEISSILEKGERLPQPPICTIDVYMIMVKCWMIDADSRPKFRELIIEFSKMARDPQRYLVIQGDERMHLPSPTDSNFYRALMDEEDMDDVVDADEYLIPQQGFFSSPSTSRTPLLSSLSATSNNSTVACIDRNGLQSCPIKEDSFLQRYSSDPTGALTEDSIDDTFLPVPGEWLVWKQSCSSTSSTHSAAASLQCPSQVLPPASPEGETVADLQTQ

SEQ ID NO: 65 - protein, 705 aa, Artificial Sequence
  derived and/or modified protein sequence (wt) from Homo sapiens__ENST00000344576.6__EGFR
MRPSGTAGAALLALLAALCPASRALEEKKVCQGTSNKLTQLGTFEDHFLSLQRMFNNCEVVLGNLEITYVQRNYDLSFLKTIQEVAGYVLIALNTVERIPLENLQIIRGNMYYENSYALAVLSNYDANKTGLKELPMRNLQEILHGAVRFSNNPALCNVESIQWRDIVSSDFLSNMSMDFQNHLGSCQKCDPSCPNGSCWGAGEENCQKLTKIICAQQCSGRCRGKSPSDCCHNQCAAGCTGPRESDCLVCRKFRDEATCKDTCPPLMLYNPTTYQMDVNPEGKYSFGATCVKKCPRNYVVTDHGSCVRACGADSYEMEEDGVRKCKKCEGPCRKVCNGIGIGEFKDSLSINATNIKHFKNCTSISGDLHILPVAFRGDSFTHTPPLDPQELDILKTVKEITGFLLIQAWPENRTDLHAFENLEIIRGRTKQHGQFSLAVVSLNITSLGLRSLKEISDGDVIISGNKNLCYANTINWKKLFGTSGQKTKIISNRGENSCKATGQVCHALCSPEGCWGPEPRDCVSCRNVSRGRECVDKCNLLEGEPREFVENSECIQCHPECLPQAMNITCTGRGPDNCIQCAHYIDGPHCVKTCPAGVMGENNTLVWKYADAGHVCHLCHPNCTYGPGNESLKAMLFCLFKLSSCNQSNDGSVSHQSGSPAAQESCLGWIPSLLPSEFQLGWGGCSHLHAWPSASVIITASSCH

SEQ ID NO: 66 - protein, 628 aa, Artificial Sequence
  derived and/or modified protein sequence (wt) from Homo sapiens__ENST00000342916.7__EGFR
MRPSGTAGAALLALLAALCPASRALEEKKVCQGTSNKLTQLGTFEDHFLSLQRMFNNCEVVLGNLEITYVQRNYDLSFLKTIQEVAGYVLIALNTVERIPLENLQIIRGNMYYENSYALAVLSNYDANKTGLKELPMRNLQEILHGAVRFSNNPALCNVESIQWRDIVSSDFLSNMSMDFQNHLGSCQKCDPSCPNGSCWGAGEENCQKLTKIICAQQCSGRCRGKSPSDCCHNQCAAGCTGPRESDCLVCRKFRDEATCKDTCPPLMLYNPTTYQMDVNPEGKYSFGATCVKKCPRNYVVTDHGSCVRACGADSYEMEEDGVRKCKKCEGPCRKVCNGIGIGEFKDSLSINATNIKHFKNCTSISGDLHILPVAFRGDSFTHTPPLDPQELDILKTVKEITGFLLIQAWPENRTDLHAFENLEIIRGRTKQHGQFSLAVVSLNITSLGLRSLKEISDGDVIISGNKNLCYANTINWKKLFGTSGQKTKIISNRGENSCKATGQVCHALCSPEGCWGPEPRDCVSCRNVSRGRECVDKCNLLEGEPREFVENSECIQCHPECLPQAMNITCTGRGPDNCIQCAHYIDGPHCVKTCPAGVMGENNTLVWKYADAGHVCHLCHPNCTYGS

SEQ ID NO: 67 - protein, 405 aa, Artificial Sequence
  derived and/or modified protein sequence (wt) from Homo sapiens__ENST00000420316.6__EGFR
MRPSGTAGAALLALLAALCPASRALEEKKVCQGTSNKLTQLGTFEDHFLSLQRMFNNCEVVLGNLEITYVQRNYDLSFLKTIQEVAGYVLIALNTVERIPLENLQIIRGNMYYENSYALAVLSNYDANKTGLKELPMRNLQEILHGAVRFSNNPALCNVESIQWRDIVSSDFLSNMSMDFQNHLGSCQKCDPSCPNGSCWGAGEENCQKLTKIICAQQCSGRCRGKSPSDCCHNQCAAGCTGPRESDCLVCRKFRDEATCKDTCPPLMLYNPTTYQMDVNPEGKYSFGATCVKKCPRNYVVTDHGSCVRACGADSYEMEEDGVRKCKKCEGPCRKVCNGIGIGEFKDSLSINATNIKHFKNCTSISGDLHILPVAFRGDSFTHTPPLDPQELDILKTVKEITGLS

SEQ ID NO: 68 - protein, 426 aa, Artificial Sequence
  derived and/or modified protein sequence (wt) from Homo sapiens__ENST00000366641.3__EGLN1
MANDSGGPGGPSPSERDRQYCELCGKMENLLRCSRCRSSFYCCKEHQRQDWKKHKLVCQGSEGALGHGVGPHQHSGPAPPAAVPPPRAGAREPRKAAARRDNASGDAAKGKVKAKPPADPAAAASPCRAAAGGQGSAVAAEAEPGKEEPPARSSLFQEKANLYPPSNTPGDALSPGGGLRPNGQTKPLPALKLALEYIVPCMNKHGICVVDDFLGKETGQQIGDEVRALHDTGKFTDGQLVSQKSDSSKDIRGDKITWIEGKEPGCETIGLLMSSMDDLIRHCNGKLGSYKINGRTKAMVACYPGNGTGYVRHVDNPNGDGRCVTCIYYLNKDWDAKVSGGILRIFPEGKAQFADIEPKFDRLLFFWSDRRNPHEVQPAYATRYAITVWYFDADERARAKVKYLTGEKGVRVELNKPSDSVGKDVF

SEQ ID NO: 69 - protein, 658 aa, Artificial Sequence
  derived and/or modified protein sequence (wt) from Homo sapiens__ENST00000373203.8__ENG
MDRGTLPLAVALLLASCSLSPTSLAETVHCDLQPVGPERGEVTYTTSQVSKGCVAQAPNAILEVHVLFLEFPTGPSQLELTLQASKQNGTWPREVLLVLSVNSSVFLHLQALGIPLHLAYNSSLVTFQEPPGVNTTELPSFPKTQILEWAAERGPITSAAELNDPQSILLRLGQAQGSLSFCMLEASQDMGRTLEWRPRTPALVRGCHLEGVAGHKEAHILRVLPGHSAGPRTVTVKVELSCAPGDLDAVLILQGPPYVSWLIDANHNMQIWTTGEYSFKIFPEKNIRGFKLPDTPQGLLGEARMLNASIVASFVELPLASIVSLHASSCGGRLQTSPAPIQTTPPKDTCSPELLMSLIQTKCADDAMTLVLKKELVAHLKCTITGLTFWDPSCEAEDRGDKFVLRSAYSSCGMQVSASMISNEAVVNILSSSSPQRKKVHCLNMDSLSFQLGLYLSPHFLQASNTIEPGQQSFVQVRVSPSVSEFLLQLDSCHLDLGPEGGTVELIQGRAAKGNCVSLLSPSPEGDPRFSFLLHFYTVPIPKTGTLSCTVALRPKTGSQDQEVHRTVFMRLNIISPDLSGCTSKGLVLPAVLGITFGAFLIGALLTAALWYIYSHTRSPSKREPVVAVAAPASSESSSTNHSIGSTQSTPCSTSSMA

SEQ ID NO: 70 - protein, 625 aa, Artificial Sequence
  derived and/or modified protein sequence (wt) from Homo sapiens__ENST00000344849.4__ENG
MDRGTLPLAVALLLASCSLSPTSLAETVHCDLQPVGPERGEVTYTTSQVSKGCVAQAPNAILEVHVLFLEFPTGPSQLELTLQASKQNGTWPREVLLVLSVNSSVFLHLQALGIPLHLAYNSSLVTFQEPPGVNTTELPSFPKTQILEWAAERGPITSAAELNDPQSILLRLGQAQGSLSFCMLEASQDMGRTLEWRPRTPALVRGCHLEGVAGHKEAHILRVLPGHSAGPRTVTVKVELSCAPGDLDAVLILQGPPYVSWLIDANHNMQIWTTGEYSFKIFPEKNIRGFKLPDTPQGLLGEARMLNASIVASFVELPLASIVSLHASSCGGRLQTSPAPIQTTPPKDTCSPELLMSLIQTKCADDAMTLVLKKELVAHLKCTITGLTFWDPSCEAEDRGDKFVLRSAYSSCGMQVSASMISNEAVVNILSSSSPQRKKVHCLNMDSLSFQLGLYLSPHFLQASNTIEPGQQSFVQVRVSPSVSEFLLQLDSCHLDLGPEGGTVELIQGRAAKGNCVSLLSPSPEGDPRFSFLLHFYTVPIPKTGTLSCTVALRPKTGSQDQEVHRTVFMRLNIISPDLSGCTSKGLVLPAVLGITFGAFLIGALLTAALWYIYSHTREYPRPPQ

SEQ ID NO: 71 - protein, 476 aa, Artificial Sequence
  derived and/or modified protein sequence (wt) from Homo sapiens__ENST00000480266.5__ENG
MLEASQDMGRTLEWRPRTPALVRGCHLEGVAGHKEAHILRVLPGHSAGPRTVTVKVELSCAPGDLDAVLILQGPPYVSWLIDANHNMQIWTTGEYSFKIFPEKNIRGFKLPDTPQGLLGEARMLNASIVASFVELPLASIVSLHASSCGGRLQTSPAPIQTTPPKDTCSPELLMSLIQTKCADDAMTLVLKKELVAHLKCTITGLTFWDPSCEAEDRGDKFVLRSAYSSCGMQVSASMISNEAVVNILSSSSPQRKKVHCLNMDSLSFQLGLYLSPHFLQASNTIEPGQQSFVQVRVSPSVSEFLLQLDSCHLDLGPEGGTVELIQGRAAKGNCVSLLSPSPEGDPRFSFLLHFYTVPIPKTGTLSCTVALRPKTGSQDQEVHRTVFMRLNIISPDLSGCTSKGLVLPAVLGITFGAFLIGALLTAALWYIYSHTRSPSKREPVVAVAAPASSESSSTNHSIGSTQSTPCSTSSMA

SEQ ID NO: 72 - protein, 1338 aa, Artificial Sequence
  derived and/or modified protein sequence (wt) from Homo sapiens__ENST00000282397.8__FLT1
MVSYWDTGVLLCALLSCLLLTGSSSGSKLKDPELSLKGTQHIMQAGQTLHLQCRGEAAHKWSLPEMVSKESERLSITKSACGRNGKQFCSTLTLNTAQANHTGFYSCKYLAVPTSKKKETESAIYIFISDTGRPFVEMYSEIPEIIHMTEGRELVIPCRVTSPNITVTLKKFPLDTLIPDGKRIIWDSRKGFIISNATYKEIGLLTCEATVNGHLYKTNYLTHRQTNTIIDVQISTPRPVKLLRGHTLVLNCTATTPLNTRVQMTWSYPDEKNKRASVRRRIDQSNSHANIFYSVLTIDKMQNKDKGLYTCRVRSGPSFKSVNTSVHIYDKAFITVKHRKQQVLETVAGKRSYRLSMKVKAFPSPEVVWLKDGLPATEKSARYLTRGYSLIIKDVTEEDAGNYTILLSIKQSNVFKNLTATLIVNVKPQIYEKAVSSFPDPALYPLGSRQILTCTAYGIPQPTIKWFWHPCNHNHSEARCDFCSNNEESFILDADSNMGNRIESITQRMAIIEGKNKMASTLVVADSRISGIYICIASNKVGTVGRNISFYITDVPNGFHVNLEKMPTEGEDLKLSCTVNKFLYRDVTWILLRTVNNRTMHYSISKQKMAITKEHSITLNLTIMNVSLQDSGTYACRARNVYTGEEILQKKEITIRDQEAPYLLRNLSDHTVAISSSTTLDCHANGVPEPQITWFKNNHKIQQEPGIILGPGSSTLFIERVTEEDEGVYHCKATNQKGSVESSAYLTVQGTSDKSNLELITLTCTCVAATLFWLLLTLFIRKMKRSSSEIKTDYLSIIMDPDEVPLDEQCERLPYDASKWEFARERLKLGKSLGRGAFGKVVQASAFGIKKSPTCRTVAVKMLKEGATASEYKALMTELKILTHIGHHLNVVNLLGACTKQGGPLMVIVEYCKYGNLSNYLKSKRDLFFLNKDAALHMEPKKEKMEPGLEQGKKPRLDSVTSSESFASSGFQEDKSLSDVEEEEDSDGFYKEPITMEDLISYSFQVARGMEFLSSRKCIHRDLAARNILLSENNVVKICDFGLARDIYKNPDYVRKGDTRLPLKWMAPESIFDKIYSTKSDVWSYGVLLWEIFSLGGSPYPGVQMDEDFCSRLREGMRMRAPEYSTPEIYQIMLDCWHRDPKERPRFAELVEKLGDLLQANVQQDGKDYIPINAILTGNSGFTYSTPAFSEDFFKESISAPKFNSGSSDDVRYVNAFKFMSLERIKTFEELLPNATSMFDDYQGDSSTLLASPMLKRFTWTDSKPKASLKIDLRVTSKSKESGLSDVSRPSFCHSSCGHVSEGKRRFTYDHAELERKIACCSPPPDYNSVVLYSTPPI

SEQ ID NO: 73 - protein, 758 aa, Artificial Sequence
  derived and/or modified protein sequence (wt) from Homo sapiens__ENST00000282397.8__FLT1(1-758)
MVSYWDTGVLLCALLSCLLLTGSSSGSKLKDPELSLKGTQHIMQAGQTLHLQCRGEAAHKWSLPEMVSKESERLSITKSACGRNGKQFCSTLTLNTAQANHTGFYSCKYLAVPTSKKKETESAIYIFISDTGRPFVEMYSEIPEIIHMTEGRELVIPCRVTSPNITVTLKKFPLDTLIPDGKRIIWDSRKGFIISNATYKEIGLLTCEATVNGHLYKTNYLTHRQTNTIIDVQISTPRPVKLLRGHTLVLNCTATTPLNTRVQMTWSYPDEKNKRASVRRRIDQSNSHANIFYSVLTIDKMQNKDKGLYTCRVRSGPSFKSVNTSVHIYDKAFITVKHRKQQVLETVAGKRSYRLSMKVKAFPSPEVVWLKDGLPATEKSARYLTRGYSLIIKDVTEEDAGNYTILLSIKQSNVFKNLTATLIVNVKPQIYEKAVSSFPDPALYPLGSRQILTCTAYGIPQPTIKWFWHPCNHNHSEARCDFCSNNEESFILDADSNMGNRIESITQRMAIIEGKNKMASTLVVADSRISGIYICIASNKVGTVGRNISFYITDVPNGFHVNLEKMPTEGEDLKLSCTVNKFLYRDVTWILLRTVNNRTMHYSISKQKMAITKEHSITLNLTIMNVSLQDSGTYACRARNVYTGEEILQKKEITIRDQEAPYLLRNLSDHTVAISSSTTLDCHANGVPEPQITWFKNNHKIQQEPGIILGPGSSTLFIERVTEEDEGVYHCKATNQKGSVESSAYLTVQGTSDKSNLE

SEQ ID NO: 74 - protein, 733 aa, Artificial Sequence
  derived and/or modified protein sequence (wt) from Homo sapiens__ENST00000541932.5__FLT1-iso3(sFlt1-14)
MVSYWDTGVLLCALLSCLLLTGSSSGSKLKDPELSLKGTQHIMQAGQTLHLQCRGEAAHKWSLPEMVSKESERLSITKSACGRNGKQFCSTLTLNTAQANHTGFYSCKYLAVPTSKKKETESAIYIFISDTGRPFVEMYSEIPEIIHMTEGRELVIPCRVTSPNITVTLKKFPLDTLIPDGKRIIWDSRKGFIISNATYKEIGLLTCEATVNGHLYKTNYLTHRQTNTIIDVQISTPRPVKLLRGHTLVLNCTATTPLNTRVQMTWSYPDEKNKRASVRRRIDQSNSHANIFYSVLTIDKMQNKDKGLYTCRVRSGPSFKSVNTSVHIYDKAFITVKHRKQQVLETVAGKRSYRLSMKVKAFPSPEVVWLKDGLPATEKSARYLTRGYSLIIKDVTEEDAGNYTILLSIKQSNVFKNLTATLIVNVKPQIYEKAVSSFPDPALYPLGSRQILTCTAYGIPQPTIKWFWHPCNHNHSEARCDFCSNNEESFILDADSNMGNRIESITQRMAIIEGKNKMASTLVVADSRISGIYICIASNKVGTVGRNISFYITDVPNGFHVNLEKMPTEGEDLKLSCTVNKFLYRDVTWILLRTVNNRTMHYSISKQKMAITKEHSITLNLTIMNVSLQDSGTYACRARNVYTGEEILQKKEITIRDQEAPYLLRNLSDHTVAISSSTTLDCHANGVPEPQITWFKNNHKIQQEPELYTSTSPSSSSSSPLSSSSSSSSSSSS

SEQ ID NO: 75 - protein, 687 aa, Artificial Sequence
  derived and/or modified protein sequence (wt) from Homo sapiens__ENST00000615840.4__FLT1-iso2(sFlt1)
MVSYWDTGVLLCALLSCLLLTGSSSGSKLKDPELSLKGTQHIMQAGQTLHLQCRGEAAHKWSLPEMVSKESERLSITKSACGRNGKQFCSTLTLNTAQANHTGFYSCKYLAVPTSKKKETESAIYIFISDTGRPFVEMYSEIPEIIHMTEGRELVIPCRVTSPNITVTLKKFPLDTLIPDGKRIIWDSRKGFIISNATYKEIGLLTCEATVNGHLYKTNYLTHRQTNTIIDVQISTPRPVKLLRGHTLVLNCTATTPLNTRVQMTWSYPDEKNKRASVRRRIDQSNSHANIFYSVLTIDKMQNKDKGLYTCRVRSGPSFKSVNTSVHIYDKAFITVKHRKQQVLETVAGKRSYRLSMKVKAFPSPEVVWLKDGLPATEKSARYLTRGYSLIIKDVTEEDAGNYTILLSIKQSNVFKNLTATLIVNVKPQIYEKAVSSFPDPALYPLGSRQILTCTAYGIPQPTIKWFWHPCNHNHSEARCDFCSNNEESFILDADSNMGNRIESITQRMAIIEGKNKMASTLVVADSRISGIYICIASNKVGTVGRNISFYITDVPNGFHVNLEKMPTEGEDLKLSCTVNKFLYRDVTWILLRTVNNRTMHYSISKQKMAITKEHSITLNLTIMNVSLQDSGTYACRARNVYTGEEILQKKEITIRGEHCNKKAVFSRISKFKSTRNDCTTQSNVKH

SEQ ID NO: 76 - protein, 665 aa, Artificial Sequence
  derived and/or modified protein sequence (wt) from Homo sapiens__ENST00000639477.1__FLT1
MVSYWDTGVLLCALLSCLLLTGSSSGSKLKDPELSLKGTQHIMQAGQTLHLQCRGEAAHKWSLPEMVSKESERLSITKSACGRNGKQFCSTLTLNTAQANHTGFYSCKYLAVPTSKKKETESAIYIFISDTGRPFVEMYSEIPEIIHMTEGRELVIPCRVTSPNITVTLKKFPLDTLIPDGKRIIWDSRKGFIISNATYKEIGLLTCEATVNGHLYKTNYLTHRQTNTIIDVQISTPRPVKLLRGHTLVLNCTATTPLNTRVQMTWSYPDEKNKRASVRRRIDQSNSHANIFYSVLTIDKMQNKDKGLYTCRVRSGPSFKSVNTSVHIYDKAFITVKHRKQQVLETVAGKRSYRLSMKVKAFPSPEVVWLKDGLPATEKSARYLTRGYSLIIKDVTEEDAGNYTILLSIKQSNVFKNLTATLIVNVKPQIYEKAVSSFPDPALYPLGSRQILTCTAYGIPQPTIKWFWHPCNHNHSEARCDFCSNNEESFILDADSNMGNRIESITQRMAIIEGKNKMASTLVVADSRISGIYICIASNKVGTVGRNISFYITDVPNGFHVNLEKMPTEGEDLKLSCTVNKFLYRDVTWILLRTVNNRTMHYSISKQKMAITKEHSITLNLTIMNVSLQDSGTYACRARNVYTGEEILQKKEITIRGSEEMLLPK

SEQ ID NO: 77 - protein, 541 aa, Artificial Sequence
  derived and/or modified protein sequence (wt) from Homo sapiens__ENST00000539099.1__FLT1-iso4
MVSYWDTGVLLCALLSCLLLTGSSSGSKLKDPELSLKGTQHIMQAGQTLHLQCRGEAAHKWSLPEMVSKESERLSITKSACGRNGKQFCSTLTLNTAQANHTGFYSCKYLAVPTSKKKETESAIYIFISDTGRPFVEMYSEIPEIIHMTEGRELVIPCRVTSPNITVTLKKFPLDTLIPDGKRIIWDSRKGFIISNATYKEIGLLTCEATVNGHLYKTNYLTHRQTNTIIDVQISTPRPVKLLRGHTLVLNCTATTPLNTRVQMTWSYPDEKNKRASVRRRIDQSNSHANIFYSVLTIDKMQNKDKGLYTCRVRSGPSFKSVNTSVHIYDKAFITVKHRKQQVLETVAGKRSYRLSMKVKAFPSPEVVWLKDGLPATEKSARYLTRGYSLIIKDVTEEDAGNYTILLSIKQSNVFKNLTATLIVNVKPQIYEKAVSSFPDPALYPLGSRQILTCTAYGIPQPTIKWFWHPCNHNHSEARCDFCSNNEESFILDADSNMGNRIESITQRMAIIEGKNKLPPANSSFMLPPTSFSSNYFHFLP

SEQ ID NO: 78 - protein, 433 aa, Artificial Sequence
  derived and/or modified protein sequence (wt) from Homo sapiens__ENST00000615611.4__FLT1
MVIVEYCKYGNLSNYLKSKRDLFFLNKDAALHMEPKKEKMEPGLEQGKKPRLDSVTSSESFASSGFQEDKSLSDVEEEEDSDGFYKEPITMEDLISYSFQVARGMEFLSSRKCIHRDLAARNILLSENNVVKICDFGLARDIYKNPDYVRKGDTRLPLKWMAPESIFDKIYSTKSDVWSYGVLLWEIFSLGGSPYPGVQMDEDFCSRLREGMRMRAPEYSTPEIYQIMLDCWHRDPKERPRFAELVEKLGDLLQANVQQDGKDYIPINAILTGNSGFTYSTPAFSEDFFKESISAPKFNSGSSDDVRYVNAFKFMSLERIKTFEELLPNATSMFDDYQGDSSTLLASPMLKRFTWTDSKPKASLKIDLRVTSKSKESGLSDVSRPSFCHSSCGHVSEGKRRFTYDHAELERKIACCSPPPDYNSVVLYSTPPI

SEQ ID NO: 79 - protein, 361 aa, Artificial Sequence
  derived and/or modified protein sequence (wt) from Homo sapiens__ENST00000543394.2__FLT1
MNSDLLVDSDGFYKEPITMEDLISYSFQVARGMEFLSSRKCIHRDLAARNILLSENNVVKICDFGLARDIYKNPDYVRKGDTRLPLKWMAPESIFDKIYSTKSDVWSYGVLLWEIFSLGGSPYPGVQMDEDFCSRLREGMRMRAPEYSTPEIYQIMLDCWHRDPKERPRFAELVEKLGDLLQANVQQDGKDYIPINAILTGNSGFTYSTPAFSEDFFKESISAPKFNSGSSDDVRYVNAFKFMSLERIKTFEELLPNATSMFDDYQGDSSTLLASPMLKRFTWTDSKPKASLKIDLRVTSKSKESGLSDVSRPSFCHSSCGHVSEGKRRFTYDHAELERKIACCSPPPDYNSVVLYSTPPI

SEQ ID NO: 80 - protein, 85 aa, Artificial Sequence
  derived and/or modified protein sequence (wt) from Homo sapiens__ENST00000540678.2__FLT1
MLKRFTWTDSKPKASLKIDLRVTSKSKESGLSDVSRPSFCHSSCGHVSEGKRRFTYDHAELERKIACCSPPPDYNSVVLYSTPPI

SEQ ID NO: 81 - protein, 690 aa, Artificial Sequence
  derived and/or modified protein sequence (wt) from Homo sapiens__ENST00000511108.5__GUCY1A1
MFCTKLKDLKITGECPFSLLAPGQVPNESSEEAAGSSESCKATVPICQDIPEKNIQESLPQRKTSRSRVYLHTLAESICKLIFPEFERLNVALQRTLAKHKIKESRKSLEREDFEKTIAEQAVAAGVPVEVIKESLGEEVFKICYEEDENILGVVGGTLKDFLNSFSTLLKQSSHCQEAGKRGRLEDASILCLDKEDDFLHVYYFFPKRTTSLILPGIIKAAAHVLYETEVEVSLMPPCFHNDCSEFVNQPYLLYSVHMKSTKPSLSPSKPQSSLVIPTSLFCKTFPFHFMFDKDMTILQFGNGIRRLMNRRDFQGKPNFEEYFEILTPKINQTFSGIMTMLNMQFVVRVRRWDNSVKKSSRVMDLKGQMIYIVESSAILFLGSPCVDRLEDFTGRGLYLSDIPIHNALRDVVLIGEQARAQDGLKKRLGKLKATLEQAHQALEEEKKKTVDLLCSIFPCEVAQQLWQGQVVQAKKFSNVTMLFSDIVGFTAICSQCSPLQVITMLNALYTRFDQQCGELDVYKVETIGDAYCVAGGLHKESDTHAVQIALMALKMMELSDEVMSPHGEPIKMRIGLHSGSVFAGVVGVKMPRYCLFGNNVTLANKFESCSVPRKINVSPTTYRLLKDCPGFVFTPRSREELPPNFPSEIPGICHFLDAYQQGTNSKPCFQKKDVEDGNANFLGKASGID

SEQ ID NO: 82 - protein, 624 aa, Artificial Sequence
  derived and/or modified protein sequence (wt) from Homo sapiens__ENST00000511507.5__GUCY1A1
MFCTKLKDLKITGECPFSLLAPGQVPNESSEEAAGSSESCKATVPICQDIPEKNIQESLPQRKTSRSRVYLHTLAESICKLIFPEFERLNVALQRTLAKHKIKESRKSLEREDFEKTIAEQAVAAGVPVEVIKESLGEEVFKICYEEDENILGVVGGTLKDFLNSFSTLLKQSSHCQEAGKRGRLEDASILCLDKEDDFLHVYYFFPKRTTSLILPGIIKAAAHVLYETEVEVSLMPPCFHNDCSEFVNQPYLLYSVHMKSTKPSLSPSKPQSSLVIPTSLFCKTFPFHFMFDKDMTILQFGNGIRRLMNRRDFQGKPNFEEYFEILTPKINQTFSGIMTMLNMQFVVRVRRWDNSVKKSSRVMDLKGQMIYIVESSAILFLGSPCVDRLEDFTGRGLYLSDIPIHNALRDVVLIGEQARAQDGLKKRLGKLKATLEQAHQALEEEKKKTVDLLCSIFPCEVAQQLWQGQVVQAKKFSNVTMLFSDIVGFTAICSQCSPLQVITMLNALYTRFDQQCGELDVYKVETIGDAYCVAGGLHKESDTHAVQIALMALKMMELSDEVMSPHGEPIKMRIGLHSGSVFAGVVGVKMPRYCLFGNNVTLANKFESCSVPRKINVSPTTYR

SEQ ID NO: 83 - protein, 432 aa, Artificial Sequence
  derived and/or modified protein sequence (wt) from Homo sapiens__ENST00000393832.7__GUCY1A1
MKSTKPSLSPSKPQSSLVIPTSLFCKTFPFHFMFDKDMTILQFGNGIRRLMNRRDFQGKPNFEEYFEILTPKINQTFSGIMTMLNMQFVVRVRRWDNSVKKSSRVMDLKGQMIYIVESSAILFLGSPCVDRLEDFTGRGLYLSDIPIHNALRDVVLIGEQARAQDGLKKRLGKLKATLEQAHQALEEEKKKTVDLLCSIFPCEVAQQLWQGQVVQAKKFSNVTMLFSDIVGFTAICSQCSPLQVITMLNALYTRFDQQCGELDVYKVETIGDAYCVAGGLHKESDTHAVQIALMALKMMELSDEVMSPHGEPIKMRIGLHSGSVFAGVVGVKMPRYCLFGNNVTLANKFESCSVPRKINVSPTTYRLLKDCPGFVFTPRSREELPPNFPSEIPGICHFLDAYQQGTNSKPCFQKKDVEDGNANFLGKASGID

SEQ ID NO: 84 - protein, 143 aa, Artificial Sequence
  derived and/or modified protein sequence (wt) from Homo sapiens__ENST00000515201.5__GUCY1A1
MFCTKLKDLKITGECPFSLLAPGQVPNESSEEAAGSSESCKATVPICQDIPEKNIQESLPQRKTSRSRVYLHTLAESICKLIFPEFERLNVALQRTLAKHKIKESRKSLEREDFEKTIAEQAVAAGGDHWRCLLCSWGITQRE

SEQ ID NO: 85 - protein, 138 aa, Artificial Sequence
  derived and/or modified protein sequence (wt) from Homo sapiens__ENST00000443668.6__GUCY1A1
MFCTKLKDLKITGECPFSLLAPGQVPNESSEEAAGSSESCKATVPICQDIPEKNIQESLPQRKTSRSRVYLHTLAESICKLIFPEFERLNVALQRTLAKHKIKESRKSLEREDFEKTIAEQAVAAEQPLPRSRKKGQA

SEQ ID NO: 86 - protein, 82 aa, Artificial Sequence
  derived and/or modified protein sequence (wt) from Homo sapiens__ENST00000509901.5__GUCY1A1
MFCTKLKDLKITGECPFSLLAPGQVPNESSEEAAGSSESCKATVPICQDIPEKNIQESLPQRKTSGDHWRCLLCSWGITQRE

SEQ ID NO: 87 - protein, 763 aa, Artificial Sequence
  derived and/or modified protein sequence (wt) from Homo sapiens__ENST00000282249.6__GUCY1A2
MSRRKISSESFSSLGSDYLETSPEEEGECPLSRLCWNGSRSPPGPLEPSPAAAAAAAAPAPTPAASAAAAAATAGARRVQRRRRVNLDSLGESISRLTAPSPQTIQQTLKRTLQYYEHQVIGYRDAEKNFHNISNRCSYADHSNKEEIEDVSGILQCTANILGLKFEEIQKRFGEEFFNICFHENERVLRAVGGTLQDFFNGFDALLEHIRTSFGKQATLESPSFLCKELPEGTLMLHYFHPHHIVGFAMLGMIKAAGKKIYRLDVEVEQVANEKLCSDVSNPGNCSCLTFLIKECENTNIMKNLPQGTSQVPADLRISINTFCRAFPFHLMFDPSMSVLQLGEGLRKQLRCDTHKVLKFEDCFEIVSPKVNATFERVLLRLSTPFVIRTKPEASGSENKDKVMEVKGQMIHVPESNSILFLGSPCVDKLDELMGRGLHLSDIPIHDATRDVILVGEQAKAQDGLKKRMDKLKATLERTHQALEEEKKKTVDLLYSIFPGDVAQQLWQGQQVQARKFDDVTMLFSDIVGFTAICAQCTPMQVISMLNELYTRFDHQCGFLDIYKVETIGDAYCVAAGLHRKSLCHAKPIALMALKMMELSEEVLTPDGRPIQPQRSELLFSFPVSIQLVPDQHQSETDLGTEKMRIGIHSGSVLAGVVGVRMPRYCLFGNNVTLASKFESGSHPRRINVSPTTYQLLKREESFTFIPRSREELPDNFPKEIPGICYFLEVRTGPKPPKPSLSSSRIKKVSYNIGTMFLRETSL

SEQ ID NO: 88 - protein, 753 aa, Artificial Sequence
  derived and/or modified protein sequence (wt) from Homo sapiens__ENST00000347596.2__GUCY1A2
MSRRKISSESFSSLGSDYLETSPEEEGECPLSRLCWNGSRSPPGPLEPSPAAAAAAAAPAPTPAASAAAAAATAGARRVQRRRRVNLDSLGESISRLTAPSPQTIQQTLKRTLQYYEHQVIGYRDAEKNFHNISNRCSYADHSNKEEIEDVSGILQCTANILGLKFEEIQKRFGEEFFNICFHENERVLRAVGGTLQDFFNGFDALLEHIRTSFGKQATLESPSFLCKELPEGTLMLHYFHPHHIVGFAMLGMIKAAGKKIYRLDVEVEQVANEKLCSDVSNPGNCSCLTFLIKECENTNIMKNLPQGTSQVPADLRISINTFCRAFPFHLMFDPSMSVLQLGEGLRKQLRCDTHKVLKFEDCFEIVSPKVNATFERVLLRLSTPFVIRTKPEASGSENKDKSKHVTEGHLTQLSVAGFNSLEVMEVKGQMIHVPESNSILFLGSPCVDKLDELMGRGLHLSDIPIHDATRDVILVGEQAKAQDGLKKRMDKLKATLERTHQALEEEKKKTVDLLYSIFPGDVAQQLWQGQQVQARKFDDVTMLFSDIVGFTAICAQCTPMQVISMLNELYTRFDHQCGFLDIYKVETIGDAYCVAAGLHRKSLCHAKPIALMALKMMELSEEVLTPDGRPIQMRIGIHSGSVLAGVVGVRMPRYCLFGNNVTLASKFESGSHPRRINVSPTTYQLLKREESFTFIPRSREELPDNFPKEIPGICYFLEVRTGPKPPKPSLSSSRIKKVSYNIGTMFLRETSL

SEQ ID NO: 89 - protein, 732 aa, Artificial Sequence
  derived and/or modified protein sequence (wt) from Homo sapiens__ENST00000526355.6__GUCY1A2
MSRRKISSESFSSLGSDYLETSPEEEGECPLSRLCWNGSRSPPGPLEPSPAAAAAAAAPAPTPAASAAAAAATAGARRVQRRRRVNLDSLGESISRLTAPSPQTIQQTLKRTLQYYEHQVIGYRDAEKNFHNISNRCSYADHSNKEEIEDVSGILQCTANILGLKFEEIQKRFGEEFFNICFHENERVLRAVGGTLQDFFNGFDALLEHIRTSFGKQATLESPSFLCKELPEGTLMLHYFHPHHIVGFAMLGMIKAAGKKIYRLDVEVEQVANEKLCSDVSNPGNCSCLTFLIKECENTNIMKNLPQGTSQVPADLRISINTFCRAFPFHLMFDPSMSVLQLGEGLRKQLRCDTHKVLKFEDCFEIVSPKVNATFERVLLRLSTPFVIRTKPEASGSENKDKVMEVKGQMIHVPESNSILFLGSPCVDKLDELMGRGLHLSDIPIHDATRDVILVGEQAKAQDGLKKRMDKLKATLERTHQALEEEKKKTVDLLYSIFPGDVAQQLWQGQQVQARKFDDVTMLFSDIVGFTAICAQCTPMQVISMLNELYTRFDHQCGFLDIYKVETIGDAYCVAAGLHRKSLCHAKPIALMALKMMELSEEVLTPDGRPIQMRIGIHSGSVLAGVVGVRMPRYCLFGNNVTLASKFESGSHPRRINVSPTTYQLLKREESFTFIPRSREELPDNFPKEIPGICYFLEVRTGPKPPKPSLSSSRIKKVSYNIGTMFLRETSL

SEQ ID NO: 90 - protein, 641 aa, Artificial Sequence
  derived and/or modified protein sequence (wt) from Homo sapiens__ENST00000502959.5__GUCY1B1
MYGFVNHALELLVIRNYGPEVWEDIKKEAQLDEEGQFLVRIIYDDSKTYDLVAAASKVLNLNAGEILQMFGKMFFVFCQESGYDTILRVLGSNVREFLQKNESKHISDLHHCFLGIYLCCNNLDALHDHLATIYPGMRAPSFRCTDAEKGKGLILHYYSEREGLQDIVIGIIKTVAQQIHGTEIDMKVIQQRNEECDHTQFLIEEKESKEEDFYEDLDRFEENGTQESRISPYTFCKAFPFHIIFDRDLVVTQCGNAIYRVLPQLQPGNCSLLSVFSLVRPHIDISFHGILSHINTVFVLRSKEGLLDVEKLECEDELTGTEISCLRLKGQMIYLPEADSILFLCSPSVMNLDDLTRRGLYLSDIPLHDATRDLVLLGEQFREEYKLTQELEILTDRLQLTLRALEDEKKKTDTLLYSVLPPSVANELRHKRPVPAKRYDNVTILFSGIVGFNAFCSKHASGEGAMKIVNLLNDLYTRFDTLTDSRKNPFVYKVETVGDKYMTVSGLPEPCIHHARSICHLALDMMEIAGQVQVDGESVQITIGIHTGEVVTGVIGQRMPRYCLFGNTVNLTSRTETTGEKGKINVSEYTYRCLMSPENSDPQFHLEHRGPVSMKGKKEPMQVWFLSRKNTGTEETKQDDD

SEQ ID NO: 91 - protein, 619 aa, Artificial Sequence
  derived and/or modified protein sequence (wt) from Homo sapiens__ENST00000264424.12__GUCY1B1
MYGFVNHALELLVIRNYGPEVWEDIKKEAQLDEEGQFLVRIIYDDSKTYDLVAAASKVLNLNAGEILQMFGKMFFVFCQESGYDTILRVLGSNVREFLQNLDALHDHLATIYPGMRAPSFRCTDAEKGKGLILHYYSEREGLQDIVIGIIKTVAQQIHGTEIDMKVIQQRNEECDHTQFLIEEKESKEEDFYEDLDRFEENGTQESRISPYTFCKAFPFHIIFDRDLVVTQCGNAIYRVLPQLQPGNCSLLSVFSLVRPHIDISFHGILSHINTVFVLRSKEGLLDVEKLECEDELTGTEISCLRLKGQMIYLPEADSILFLCSPSVMNLDDLTRRGLYLSDIPLHDATRDLVLLGEQFREEYKLTQELEILTDRLQLTLRALEDEKKKTDTLLYSVLPPSVANELRHKRPVPAKRYDNVTILFSGIVGFNAFCSKHASGEGAMKIVNLLNDLYTRFDTLTDSRKNPFVYKVETVGDKYMTVSGLPEPCIHHARSICHLALDMMEIAGQVQVDGESVQITIGIHTGEVVTGVIGQRMPRYCLFGNTVNLTSRTETTGEKGKINVSEYTYRCLMSPENSDPQFHLEHRGPVSMKGKKEPMQVWFLSRKNTGTEETKQDDD

SEQ ID NO: 92 - protein, 599 aa, Artificial Sequence
  derived and/or modified protein sequence (wt) from Homo sapiens__ENST00000505764.5__GUCY1B1
MLMCFIKEAQLDEEGQFLVRIIYDDSKTYDLVAAASKVLNLNAGEILQMFGKMFFVFCQESGYDTILRVLGSNVREFLQNLDALHDHLATIYPGMRAPSFRCTDAEKGKGLILHYYSEREGLQDIVIGIIKTVAQQIHGTEIDMKVIQQRNEECDHTQFLIEEKESKEEDFYEDLDRFEENGTQESRISPYTFCKAFPFHIIFDRDLVVTQCGNAIYRVLPQLQPGNCSLLSVFSLVRPHIDISFHGILSHINTVFVLRSKEGLLDVEKLECEDELTGTEISCLRLKGQMIYLPEADSILFLCSPSVMNLDDLTRRGLYLSDIPLHDATRDLVLLGEQFREEYKLTQELEILTDRLQLTLRALEDEKKKTDTLLYSVLPPSVANELRHKRPVPAKRYDNVTILFSGIVGFNAFCSKHASGEGAMKIVNLLNDLYTRFDTLTDSRKNPFVYKVETVGDKYMTVSGLPEPCIHHARSICHLALDMMEIAGQVQVDGESVQITIGIHTGEVVTGVIGQRMPRYCLFGNTVNLTSRTETTGEKGKINVSEYTYRCLMSPENSDPQFHLEHRGPVSMKGKKEPMQVWFLSRKNTGTEETKQDDD

SEQ ID NO: 93 - protein, 594 aa, Artificial Sequence
  derived and/or modified protein sequence (wt) from Homo sapiens__ENST00000507146.5__GUCY1B1
MFGKMFFVFCQESGYDTILRVLGSNVREFLQNLDALHDHLATIYPGMRAPSFRCTDAEKGKGLILHYYSEREGLQDIVIGIIKTVAQQIHGTEIDMKVIQQRNEECDHTQFLIEEKESKEEDFYEDLDRFEENGTQESRISPYTFCKAFPFHIIFDRDLVVTQCGNAIYRVLPQLQPGNCSLLSVFSLVRPHIDISFHGILSHINTVFVLRSKEGLLDVEKLECEDELTGTEISCLRLKGQMIYLPEADSILFLCSPSVMNLDDLTRRGLYLSDIPLHDATRDLVLLGEQFREEYKLTQELEILTDRLQLTLRALEDEKKKTDTGCPARIQAFKVQTTLMLCEKDSRSTKGFPSISYSGFLLIPLNRLLYSVLPPSVANELRHKRPVPAKRYDNVTILFSGIVGFNAFCSKHASGEGAMKIVNLLNDLYTRFDTLTDSRKNPFVYKVETVGDKYMTVSGLPEPCIHHARSICHLALDMMEIAGQVQVDGESVQITIGIHTGEVVTGVIGQRMPRYCLFGNTVNLTSRTETTGEKGKINVSEYTYRCLMSPENSDPQFHLEHRGPVSMKGKKEPMQVWFLSRKNTGTEETKQDDD

SEQ ID NO: 94 - protein, 586 aa, Artificial Sequence
  derived and/or modified protein sequence (wt) from Homo sapiens__ENST00000503520.5__GUCY1B1
MYGFVNHALELLVIRNYGPEVWEDIKKEAQLDEEGQFLVRIIYDDSKTYDLVAAASKVLNLNAGEILQMFGKMFFVFCQESGYDTILRVLGSNVREFLQNLDALHDHLATIYPGMRAPSFRCTDAEKGKGLILHYYSEREGLQDIVIGIIKTVAQQIHGTEIDMKVIQQRNEECDHTQFLIEEKESKEEDFYEDLDRFEENGTQESRISPYTFCKAFPFHIIFDRDLVVTQCGNAIYRVLPQLQPGNCSLLSVFSLVRPHIDISFHGILSHINTVFVLRSKEGLLDVEKLECEDELTGTEISCLRLKGQMIYLPEADSILFLCSPSVMNLDDLTRRGLYLSDIPLHDATRDLVLLGEQFREEYKLTQELEILTDRLQLTLRALEDEKKKTDTGIVGFNAFCSKHASGEGAMKIVNLLNDLYTRFDTLTDSRKNPFVYKVETVGDKYMTVSGLPEPCIHHARSICHLALDMMEIAGQVQVDGESVQITIGIHTGEVVTGVIGQRMPRYCLFGNTVNLTSRTETTGEKGKINVSEYTYRCLMSPENSDPQFHLEHRGPVSMKGKKEPMQVWFLSRKNTGTEETKQDDD

SEQ ID NO: 95 - protein, 551 aa, Artificial Sequence
  derived and/or modified protein sequence (wt) from Homo sapiens__ENST00000505154.5__GUCY1B1
MFGKMFFVFCQESGYDTILRVLGSNVREFLQNLDALHDHLATIYPGMRAPSFRCTDAEKGKGLILHYYSEREGLQDIVIGIIKTVAQQIHGTEIDMKVIQQRNEECDHTQFLIEEKESKEEDFYEDLDRFEENGTQESRISPYTFCKAFPFHIIFDRDLVVTQCGNAIYRVLPQLQPGNCSLLSVFSLVRPHIDISFHGILSHINTVFVLRSKEGLLDVEKLECEDELTGTEISCLRLKGQMIYLPEADSILFLCSPSVMNLDDLTRRGLYLSDIPLHDATRDLVLLGEQFREEYKLTQELEILTDRLQLTLRALEDEKKKTDTLLYSVLPPSVANELRHKRPVPAKRYDNVTILFSGIVGFNAFCSKHASGEGAMKIVNLLNDLYTRFDTLTDSRKNPFVYKVETVGDKYMTVSGLPEPCIHHARSICHLALDMMEIAGQVQVDGESVQITIGIHTGEVVTGVIGQRMPRYCLFGNTVNLTSRTETTGEKGKINVSEYTYRCLMSPENSDPQFHLEHRGPVSMKGKKEPMQVWFLSRKNTGTEETKQDDD

SEQ ID NO: 96 - protein, 617 aa, Artificial Sequence
  derived and/or modified protein sequence (wt) from Homo sapiens__ENST00000493639.6__GUCY1B2
MSGYDRMLRTLGGNLMEFIENLDALHSYLALSYQEMNAPSFRVERGADGKMFLHYYSDRSGLCHIVPGIIEAVAKDFFDIDVIMDILDMNEEVERTGKKEHVVFLIVQKAHRKMRKTKPKRLQDSQGMERDQEALQAAFLKMKEKYLNVSACPVKKSHWDVVRSIVMFGKGHLMNTFEPIYPERLWIEEKTFCNAFPFHIVFDESLQVKQARVNIQKYVPGLQTQNIQLDEYFSIIHPQVTFNIFSIRRFINSQFVLKTRREMMPVAWQSRTTLKLQGQMIWMESMWCMVYLCSPKLRSLQELEELNMHLSDIAPNDTTRDLILLNQQRLAEIELSNQLERKKEELQVLSKHLAIEKKKTETLLYAMLPKHVANQLREGKKVAAGEFKSCTILFSDVVTFTNICTACEPIQIVNVLNSMYSKFDRLTSVHAVYKVETIGDAYMVVGGVPVPIGNHAQRVANFALGMRISAKEVTNPVTGEPIQLRVGIHTGPVLADVVGDKMPRYCLFGDTVNTASRMESHGLPNKVHLSPTAYRALKNQGFKIIERGEIEVKGKGRMTTYFLIQNLNATEDEIMGRSKTPVDHKGSTQKASLPTTKLQGSVQPSCPEHSSLASWLL

SEQ ID NO: 97 - protein, 1103 aa, Artificial Sequence
  derived and/or modified protein sequence (wt) from Homo sapiens__ENST00000254854.4__GUCY2D
MTACARRAGGLPDPGLCGPAWWAPSLPRLPRALPRLPLLLLLLLLQPPALSAVFTVGVLGPWACDPIFSRARPDLAARLAAARLNRDPGLAGGPRFEVALLPEPCRTPGSLGAVSSALARVSGLVGPVNPAACRPAELLAEEAGIALVPWGCPWTQAEGTTAPAVTPAADALYALLRAFGWARVALVTAPQDLWVEAGRSLSTALRARGLPVASVTSMEPLDLSGAREALRKVRDGPRVTAVIMVMHSVLLGGEEQRYLLEAAEELGLTDGSLVFLPFDTIHYALSPGPEALAALANSSQLRRAHDAVLTLTRHCPSEGSVLDSLRRAQERRELPSDLNLQQVSPLFGTIYDAVFLLARGVAEARAAAGGRWVSGAAVARHIRDAQVPGFCGDLGGDEEPPFVLLDTDAAGDRLFATYMLDPARGSFLSAGTRMHFPRGGSAPGPDPSCWFDPNNICGGGLEPGLVFLGFLLVVGMGLAGAFLAHYVRHRLLHMQMVSGPNKIILTVDDITFLHPHGGTSRKVAQGSRSSLGARSMSDIRSGPSQHLDSPNIGVYEGDRVWLKKFPGDQHIAIRPATKTAFSKLQELRHENVALYLGLFLARGAEGPAALWEGNLAVVSEHCTRGSLQDLLAQREIKLDWMFKSSLLLDLIKGIRYLHHRGVAHGRLKSRNCIVDGRFVLKITDHGHGRLLEAQKVLPEPPRAEDQLWTAPELLRDPALERRGTLAGDVFSLAIIMQEVVCRSAPYAMLELTPEEVVQRVRSPPPLCRPLVSMDQAPVECILLMKQCWAEQPELRPSMDHTFDLFKNINKGRKTNIIDSMLRMLEQYSSNLEDLIRERTEELELEKQKTDRLLTQMLPPSVAEALKTGTPVEPEYFEQVTLYFSDIVGFTTISAMSEPIEVVDLLNDLYTLFDAIIGSHDVYKVETIGDAYMVASGLPQRNGQRHAAEIANMSLDILSAVGTFRMRHMPEVPVRIRIGLHSGPCVAGVVGLTMPRYCLFGDTVNTASRMESTGLPYRIHVNLSTVGILRALDSGYQVELRGRTELKGKGAEDTFWLVGRRGFNKPIPKPPDLQPGSSNHGISLQEIPPERRRKLEKARPGQFS

SEQ ID NO: 98 - protein, 1108 aa, Artificial Sequence
  derived and/or modified protein sequence (wt) from Homo sapiens__ENST00000218006.2__GUCY2F
MFLGLGRFSRLVLWFAAFRKLLGHHGLASAKFLWCLCLLSVMSLPQQVWTLPYKIGVVGPWACDSLFSKALPEVAARLAIERINRDPSFDLSYSFEYVILNEDCQTSRALSSFISHHQMASGFIGPTNPGYCEAASLLGNSWDKGIFSWACVNYELDNKISYPTFSRTLPSPIRVLVTVMKYFQWAHAGVISSDEDIWVHTANRVASALRSHGLPVGVVLTTGQDSQSMRKALQRIHQADRIRIIIMCMHSALIGGETQMHLLECAHDLKMTDGTYVFVPYDALLYSLPYKHTPYRVLRNNPKLREAYDAVLTITVESQEKTFYQAFTEAAARGEIPEKLEFDQVSPLFGTIYNSIYFIAQAMNNAMKENGQAGAASLVQHSRNMQFHGFNQLMRTDSNGNGISEYVILDTNLKEWELHSTYTVDMEMELLRFGGTPIHFPGGRPPRADAKCWFAEGKICHGGIDPAFAMMVCLTLLIALLSINGFAYFIRRRINKIQLIKGPNRILLTLEDVTFINPHFGSKRGSRASVSFQITSEVQSGRSPRLSFSSGSLTPATYENSNIAIYEGDWVWLKKFSLGDFGDLKSIKSRASDVFEMMKDLRHENINPLLGFFYDSGMFAIVTEFCSRGSLEDILTNQDVKLDWMFKSSLLLDLIKGMKYLHHREFVHGRLKSRNCVVDGRFVLKVTDYGFNDILEMLRLSEEESSMEELLWTAPELLRAPRGSRLGSFAGDVYSFAIIMQEVMVRGTPFCMMDLPAQEIINRLKKPPPVYRPVVPPEHAPPECLQLMKQCWAEAAEQRPTFDEIFNQFKTFNKGKKTNIIDSMLRMLEQYSSNLEDLIRERTEELEIEKQKTEKLLTQMLPPSVAESLKKGCTVEPEGFDLVTLYFSDIVGFTTISAMSEPIEVVDLLNDLYTLFDAIIGSHDVYKVETIGDAYMVASGLPKRNGSRHAAEIANMSLDILSSVGTFKMRHMPEVPVRIRIGLHSGPVVAGVVGLTMPRYCLFGDTVNTASRMESTGLPYRIHVSLSTVTILQNLSEGYEVELRGRTELKGKGTEETFWLIGKKGFMKPLPVPPPVDKDGQVGHGLQPVEIAAFQRRKAERQLVRNKP

SEQ ID NO: 99 - protein, 308 aa, Artificial Sequence
  derived and/or modified protein sequence (wt) from Homo sapiens__ENST00000337919.9__HEY1
MKRAHPEYSSSDSELDETIEVEKESADENGNLSSALGSMSPTTSSQILARKRRRGIIEKRRRDRINNSLSELRRLVPSAFEKQVMEQGSAKLEKAEILQMTVDHLKMLHTAGGKGYFDAHALAMDYRSLGFRECLAEVARYLSIIEGLDASDPLRVRLVSHLNNYASQREAASGAHAGLGHIPWGTVFGHHPHIAHPLLLPQNGHGNAGTTASPTEPHHQGRLGSAHPEAPALRAPPSGSLGPVLPVVTSASKLSPPLLSSVASLSAFPFSFGSFHLLSPNALSPSAPTQAANLGKPYRPWGTEIGAF

SEQ ID NO: 100 - protein, 304 aa, Artificial Sequence
  derived and/or modified protein sequence (wt) from Homo sapiens__ENST00000354724.7__HEY1
MKRAHPEYSSSDSELDETIEVEKESADENGNLSSALGSMSPTTSSQILARKRRRGIIEKRRRDRINNSLSELRRLVPSAFEKQGSAKLEKAEILQMTVDHLKMLHTAGGKGYFDAHALAMDYRSLGFRECLAEVARYLSIIEGLDASDPLRVRLVSHLNNYASQREAASGAHAGLGHIPWGTVFGHHPHIAHPLLLPQNGHGNAGTTASPTEPHHQGRLGSAHPEAPALRAPPSGSLGPVLPVVTSASKLSPPLLSSVASLSAFPFSFGSFHLLSPNALSPSAPTQAANLGKPYRPWGTEIGAF

SEQ ID NO: 101 - protein, 214 aa, Artificial Sequence
  derived and/or modified protein sequence (wt) from Homo sapiens__ENST00000523976.1__HEY1
MPLEERNVFWLSKGNLTGDQGYFDAHALAMDYRSLGFRECLAEVARYLSIIEGLDASDPLRVRLVSHLNNYASQREAASGAHAGLGHIPWGTVFGHHPHIAHPLLLPQNGHGNAGTTASPTEPHHQGRLGSAHPEAPALRAPPSGSLGPVLPVVTSASKLSPPLLSSVASLSAFPFSFGSFHLLSPNALSPSAPTQAANLGKPYRPWGTEIGAF

SEQ ID NO: 102 - protein, 1212 aa, Artificial Sequence
  derived and/or modified protein sequence (wt) from Homo sapiens__ENST00000519389.5__HEPH
MTQTLPYHLSLLNVLFPGPCSRHFKFRRGKCAQPAWRKVSAPSQDLLITKVMWAMESGHLLWALLFMQSLWPQLTDGATRVYYLGIRDVQWNYAPKGRNVITNQPLDSDIVASSFLKSDKNRIGGTYKKTIYKEYKDDSYTDEVAQPAWLGFLGPVLQAEVGDVILIHLKNFATRPYTIHPHGVFYEKDSEGSLYPDGSSGPLKADDSVPPGGSHIYNWTIPEGHAPTDADPACLTWIYHSHVDAPRDIATGLIGPLITCKRGALDGNSPPQRQDVDHDFFLLFSVVDENLSWHLNENIATYCSDPASVDKEDETFQESNRMHAINGFVFGNLPELNMCAQKRVAWHLFGMGNEIDVHTAFFHGQMLTTRGHHTDVANIFPATFVTAEMVPWEPGTWLISCQVNSHFRDGMQALYKVKSCSMAPPVDLLTGKVRQYFIEAHEIQWDYGPMGHDGSTGKNLREPGSISDKFFQKSSSRIGGTYWKVRYEAFQDETFQEKMHLEEDRHLGILGPVIRAEVGDTIQVVFYNRASQPFSMQPHGVFYEKDYEGTVYNDGSSYPGLVAKPFEKVTYRWTVPPHAGPTAQDPACLTWMYFSAADPIRDTNSGLVGPLLVCRAGALGADGKQKGVDKEFFLLFTVLDENKSWYSNANQAAAMLDFRLLSEDIEGFQDSNRMHAINGFLFSNLPRLDMCKGDTVAWHLLGLGTETDVHGVMFQGNTVQLQGMRKGAAMLFPHTFVMAIMQPDNLGTFEIYCQAGSHREAGMRAIYNVSQCPGHQATPRQRYQAARIYYIMAEEVEWDYCPDRSWEREWHNQSEKDSYGYIFLSNKDGLLGSRYKKAVFREYTDGTFRIPRPRTGPEEHLGILGPLIKGEVGDILTVVFKNNASRPYSVHAHGVLESTTVWPLAAEPGEVVTYQWNIPERSGPGPNDSACVSWIYYSAVDPIKDMYSGLVGPLAICQKGILEPHGGRSDMDREFALLFLIFDENKSWYLEENVATHGSQDPGSINLQDETFLESNKMHAINGKLYANLRGLTMYQGERVAWYMLAMGQDVDLHTIHFHAESFLYRNGENYRADVVDLFPGTFEVVEMVASNPGTWLMHCHVTDHVHAGMETLFTVFSRTEHLSPLTVITKETEKAVPPRDIEEGNVKMLGMQIPIKNVEMLASVLVAISVTLLLVVLALGGVVWYQHRQRKLRRNRRSILDDSFKLLSFKQ

SEQ ID NO: 103 - protein, 1160 aa, Artificial Sequence
  derived and/or modified protein sequence (wt) from Homo sapiens__ENST00000441993.6__HEPH
MWAMESGHLLWALLFMQSLWPQLTDGATRVYYLGIRDVQWNYAPKGRNVITNQPLDSDIVASSFLKSDKNRIGGTYKKTIYKEYKDDSYTDEVAQPAWLGFLGPVLQAEVGDVILIHLKNFATRPYTIHPHGVFYEKDSEGSLYPDGSSGPLKADDSVPPGGSHIYNWTIPEGHAPTDADPACLTWIYHSHVDAPRDIATGLIGPLITCKRGALDGNSPPQRQDVDHDFFLLFSVVDENLSWHLNENIATYCSDPASVDKEDETFQESNRMHAINGFVFGNLPELNMCAQKRVAWHLFGMGNEIDVHTAFFHGQMLTTRGHHTDVANIFPATFVTAEMVPWEPGTWLISCQVNSHFRDGMQALYKVKSCSMAPPVDLLTGKVRQYFIEAHEIQWDYGPMGHDGSTGKNLREPGSISDKFFQKSSSRIGGTYWKVRYEAFQDETFQEKMHLEEDRHLGILGPVIRAEVGDTIQVVFYNRASQPFSMQPHGVFYEKDYEGTVYNDGSSYPGLVAKPFEKVTYRWTVPPHAGPTAQDPACLTWMYFSAADPIRDTNSGLVGPLLVCRAGALGADGKQKGVDKEFFLLFTVLDENKSWYSNANQAAAMLDFRLLSEDIEGFQDSNRMHAINGFLFSNLPRLDMCKGDTVAWHLLGLGTETDVHGVMFQGNTVQLQGMRKGAAMLFPHTFVMAIMQPDNLGTFEIYCQAGSHREAGMRAIYNVSQCPGHQATPRQRYQAARIYYIMAEEVEWDYCPDRSWEREWHNQSEKDSYGYIFLSNKDGLLGSRYKKAVFREYTDGTFRIPRPRTGPEEHLGILGPLIKGEVGDILTVVFKNNASRPYSVHAHGVLESTTVWPLAAEPGEVVTYQWNIPERSGPGPNDSACVSWIYYSAVDPIKDMYSGLVGPLAICQKGILEPHGGRSDMDREFALLFLIFDENKSWYLEENVATHGSQDPGSINLQDETFLESNKMHAINGKLYANLRGLTMYQGERVAWYMLAMGQDVDLHTIHFHAESFLYRNGENYRADVVDLFPGTFEVVEMVASNPGTWLMHCHVTDHVHAGMETLFTVFSRTEHLSPLTVITKETEKVPPRDIEEGNVKMLGMQIPIKNVEMLASVLVAISVTLLLVVLALGGVVWYQHRQRKLRRNRRSILDDSFKLLSFKQ

SEQ ID NO: 104 - protein, 1158 aa, Artificial Sequence
  derived and/or modified protein sequence (wt) from Homo sapiens__ENST00000343002.6__HEPH
MESGHLLWALLFMQSLWPQLTDGATRVYYLGIRDVQWNYAPKGRNVITNQPLDSDIVASSFLKSDKNRIGGTYKKTIYKEYKDDSYTDEVAQPAWLGFLGPVLQAEVGDVILIHLKNFATRPYTIHPHGVFYEKDSEGSLYPDGSSGPLKADDSVPPGGSHIYNWTIPEGHAPTDADPACLTWIYHSHVDAPRDIATGLIGPLITCKRGALDGNSPPQRQDVDHDFFLLFSVVDENLSWHLNENIATYCSDPASVDKEDETFQESNRMHAINGFVFGNLPELNMCAQKRVAWHLFGMGNEIDVHTAFFHGQMLTTRGHHTDVANIFPATFVTAEMVPWEPGTWLISCQVNSHFRDGMQALYKVKSCSMAPPVDLLTGKVRQYFIEAHEIQWDYGPMGHDGSTGKNLREPGSISDKFFQKSSSRIGGTYWKVRYEAFQDETFQEKMHLEEDRHLGILGPVIRAEVGDTIQVVFYNRASQPFSMQPHGVFYEKDYEGTVYNDGSSYPGLVAKPFEKVTYRWTVPPHAGPTAQDPACLTWMYFSAADPIRDTNSGLVGPLLVCRAGALGADGKQKGVDKEFFLLFTVLDENKSWYSNANQAAAMLDFRLLSEDIEGFQDSNRMHAINGFLFSNLPRLDMCKGDTVAWHLLGLGTETDVHGVMFQGNTVQLQGMRKGAAMLFPHTFVMAIMQPDNLGTFEIYCQAGSHREAGMRAIYNVSQCPGHQATPRQRYQAARIYYIMAEEVEWDYCPDRSWEREWHNQSEKDSYGYIFLSNKDGLLGSRYKKAVFREYTDGTFRIPRPRTGPEEHLGILGPLIKGEVGDILTVVFKNNASRPYSVHAHGVLESTTVWPLAAEPGEVVTYQWNIPERSGPGPNDSACVSWIYYSAVDPIKDMYSGLVGPLAICQKGILEPHGGRSDMDREFALLFLIFDENKSWYLEENVATHGSQDPGSINLQDETFLESNKMHAINGKLYANLRGLTMYQGERVAWYMLAMGQDVDLHTIHFHAESFLYRNGENYRADVVDLFPGTFEVVEMVASNPGTWLMHCHVTDHVHAGMETLFTVFSRTEHLSPLTVITKETEKAVPPRDIEEGNVKMLGMQIPIKNVEMLASVLVAISVTLLLVVLALGGVVWYQHRQRKLRRNRRSILDDSFKLLSFKQ

SEQ ID NO: 105 - protein, 969 aa, Artificial Sequence
  derived and/or modified protein sequence (wt) from Homo sapiens__ENST00000419594.5__HEPH
MWAMESGHLLWALLFMQSLWPQLTDGATRVYYLGIRDVQWNYAPKGRNVITNQPLDSDIVASSFLKSDKNRIGGTYKKTIYKEYKDDSYTDEVAQPAWLGFLGPVLQAEVGDVILIHLKNFATRPYTIHPHGVFYEKDSEGSLYPDGSSGPLKADDSVPPGGSHIYNWTIPEGHAPTDADPACLTWIYHSHVDAPRDIATGLIGPLITCKRGALDGNSPPQRQDVDHDFFLLFSVVDENLSWHLNENIATYCSDPASVDKEDETFQESNRMHAINGFVFGNLPELNMCAQKRVAWHLFGMGNEIDVHTAFFHGQMLTTRGHHTDVANIFPATFVTAEMVPWEPGTWLISCQVNSHFRDGMQALYKVKSCSMAPPVDLLTGKVRQYFIEAHEIQWDYGPMGHDGSTGKNLREPGSISDKFFQKSSSRIGGTYWKVRYEAFQDETFQEKMHLEEDRHLGILGPVIRAEVGDTIQVVFYNRASQPFSMQPHGVFYEKDYEGTVYNDGTFEIYCQAGSHREAGMRAIYNVSQCPGHQATPRQRYQAARIYYIMAEEVEWDYCPDRSWEREWHNQSEKDSYGYIFLSNKDGLLGSRYKKAVFREYTDGTFRIPRPRTGPEEHLGILGPLIKGEVGDILTVVFKNNASRPYSVHAHGVLESTTVWPLAAEPGEVVTYQWNIPERSGPGPNDSACVSWIYYSAVDPIKDMYSGLVGPLAICQKGILEPHGGRSDMDREFALLFLIFDENKSWYLEENVATHGSQDPGSINLQDETFLESNKMHAINGKLYANLRGLTMYQGERVAWYMLAMGQDVDLHTIHFHAESFLYRNGENYRADVVDLFPGTFEVVEMVASNPGTWLMHCHVTDHVHAGMETLFTVFSRTEHLSPLTVITKETEKAVPPRDIEEGNVKMLGMQIPIKNVEMLASVLVAISVTLLLVVLALGGVVWYQHRQRKLRRNRRSILDDSFKLLSFKQ

SEQ ID NO: 106 - protein, 891 aa, Artificial Sequence
  derived and/or modified protein sequence (wt) from Homo sapiens__ENST00000336279.9__HEPH
MHAINGFVFGNLPELNMCAQKRVAWHLFGMGNEIDVHTAFFHGQMLTTRGHHTDVANIFPATFVTAEMVPWEPGTWLISCQVNSHFRDGMQALYKVKSCSMAPPVDLLTGKVRQYFIEAHEIQWDYGPMGHDGSTGKNLREPGSISDKFFQKSSSRIGGTYWKVRYEAFQDETFQEKMHLEEDRHLGILGPVIRAEVGDTIQVVFYNRASQPFSMQPHGVFYEKDYEGTVYNDGSSYPGLVAKPFEKVTYRWTVPPHAGPTAQDPACLTWMYFSAADPIRDTNSGLVGPLLVCRAGALGADGKQKGVDKEFFLLFTVLDENKSWYSNANQAAAMLDFRLLSEDIEGFQDSNRMHAINGFLFSNLPRLDMCKGDTVAWHLLGLGTETDVHGVMFQGNTVQLQGMRKGAAMLFPHTFVMAIMQPDNLGTFEIYCQAGSHREAGMRAIYNVSQCPGHQATPRQRYQAARIYYIMAEEVEWDYCPDRSWEREWHNQSEKDSYGYIFLSNKDGLLGSRYKKAVFREYTDGTFRIPRPRTGPEEHLGILGPLIKGEVGDILTVVFKNNASRPYSVHAHGVLESTTVWPLAAEPGEVVTYQWNIPERSGPGPNDSACVSWIYYSAVDPIKDMYSGLVGPLAICQKGILEPHGGRSDMDREFALLFLIFDENKSWYLEENVATHGSQDPGSINLQDETFLESNKMHAINGKLYANLRGLTMYQGERVAWYMLAMGQDVDLHTIHFHAESFLYRNGENYRADVVDLFPGTFEVVEMVASNPGTWLMHCHVTDHVHAGMETLFTVFSRTEHLSPLTVITKETEKAVPPRDIEEGNVKMLGMQIPIKNVEMLASVLVAISVTLLLVVLALGGVVWYQHRQRKLRRNRRSILDDSFKLLSFKQ

SEQ ID NO: 107 - protein, 63 aa, Artificial Sequence
  derived and/or modified protein sequence (wt) from Homo sapiens__ENST00000429547.5__HEPH
MWAMESGHLLWALLFMQSLWPQLTDGATRVYYLGIRDVQWNYAPKGRNVITNQPLDSDIYVKM

SEQ ID NO: 108 - protein, 1159 aa, Artificial Sequence
  derived and/or modified protein sequence (wt) from Homo sapiens__ENST00000315765.9__HEPHL1
MPRKQPAGCIFLLTFLGLSGLVGTVTRTYYIGIVEEYWNYVPQGKNVITGKSFTEDKLATLFLERGPNRIGSIYKKAVYRRFTDGTYSIEIPKPPWLGFLGPILRAEVGDVIVIHLKNFASRPYSLHPHGVFYNKDSEGALYPDGTSGRNKNDDMVPPGKNYTYVWPVREEYAPTPADANCLTWVYHSHIDAPKDICSGLIGPLLVCKEGILNRYSGTRNDVDREFVIMFTLVDENQSWYLNENIKHFCTNPDSVDKKDAVFQRSNKMHALNGYLFGNFPEPDMCVGESVSWHLFGMGNEIDIHSIYFYGNTFISRGHRTDVVNLFPATFLTTEMIAENPGKWMITCQVSDHLQAGMLGQYNVDNCKSDIFYPKMKGQQRRYFIAAEKILWDYAPQGYNKFSGLPLNASGSDSDLYFTQGDNRIGGKYWKVRYTEFVDATFTKRKRLSAEEAHLGILGPVIKAEVGDTLLVTFANKADKVYSILPHGVIYDKASDAAPNLDGFVKPGAHVKPGETFTYKWTVPESVSPTAGDPPCLTYLYFSAVDPIKDTSSGLVGPLLVCKKGVLNADGTQKGIDKEFYLLFTVFDENLSRYFDENIQKFIWHPFSIDKEDKEFVKSNRMHAVNGYMYGNQPGLNMCKRDRVSWHLIGLGTDTDMHGIVFQGNTIHLRGTHRDSLALFPHMATTAFMQPDHAGIFRVFCATMPHLSRGMGQIYEVSSCDNRDPSEQRYGMIRTFYIAAEEVEWDYAPNKNWEFEKQHVDARGERHGDIFMNRTENWIGSQYKKVVYREYTDGEFVEIKARPPREEHLELLGPMIHAEVGNTVLIIFKNKASRPYSISAQGVEEMDSGKQFQVPMTKPGEVKTYRWNIPKRSGPGPSDPNCIPWVYYSTVNFVKDTYSGLMGPLITCRKGVLNEKGRRSDVDYEFALLFLVFNENESWYLDDNIKKYLNKDPRDFKRTDDFEESNRMHAINGKIFGNLHGLIMNEDTMTNWYLLGIGSEVDIHTIHYHAESFLFKIDKSYREDVYDLFPGTFQTIELFADHPGTWLLHCHVSDHIHAGMETTYTVLRNIDNRIPYSTTSPGVASHPATVPSNERPGKEQLYFFGKNLGPTGAKAALVILFIIGLLLLITTVILSLRLCSAMKQTDYQQVQSCALPTDAL

SEQ ID NO: 109 - protein, 180 aa, Artificial Sequence
  derived and/or modified protein sequence (wt) from Homo sapiens__ENST00000259206.9__IL1RN
MALADLYEEGGGGGGEGEDNADSKETICRPSGRKSSKMQAFRIWDVNQKTFYLRNNQLVAGYLQGPNVNLEEKIDVVPIEPHALFLGIHGGKMCLSCVKSGDETRLQLEAVNITDLSENRKQDKRFAFIRSDSGPTTSFESAACPGWFLCTAMEADQPVSLTNMPDEGVMVTKFYFQEDE

SEQ ID NO: 110 - protein, 177 aa, Artificial Sequence
  derived and/or modified protein sequence (wt) from Homo sapiens__ENST00000409930.3__IL1RN
MEICRGLRSHLITLLLFLFHSETICRPSGRKSSKMQAFRIWDVNQKTFYLRNNQLVAGYLQGPNVNLEEKIDVVPIEPHALFLGIHGGKMCLSCVKSGDETRLQLEAVNITDLSENRKQDKRFAFIRSDSGPTTSFESAACPGWFLCTAMEADQPVSLTNMPDEGVMVTKFYFQEDE

SEQ ID NO: 111 - protein, 159 aa, Artificial Sequence
  derived and/or modified protein sequence (wt) from Homo sapiens__ENST00000354115.6__IL1RN
MALETICRPSGRKSSKMQAFRIWDVNQKTFYLRNNQLVAGYLQGPNVNLEEKIDVVPIEPHALFLGIHGGKMCLSCVKSGDETRLQLEAVNITDLSENRKQDKRFAFIRSDSGPTTSFESAACPGWFLCTAMEADQPVSLTNMPDEGVMVTKFYFQEDE

SEQ ID NO: 112 - protein, 143 aa, Artificial Sequence
  derived and/or modified protein sequence (wt) from Homo sapiens__ENST00000361779.7__IL1RN
MQAFRIWDVNQKTFYLRNNQLVAGYLQGPNVNLEEKIDVVPIEPHALFLGIHGGKMCLSCVKSGDETRLQLEAVNITDLSENRKQDKRFAFIRSDSGPTTSFESAACPGWFLCTAMEADQPVSLTNMPDEGVMVTKFYFQEDE

SEQ ID NO: 113 - protein, 1356 aa, Artificial Sequence
  derived and/or modified protein sequence (wt) from Homo sapiens__ENST00000645273.1__KDR
MQSKVLLAVALWLCVETRAASVGLPSVSLDLPRLSIQKDILTIKANTTLQITCRGQRDLDWLWPNNQSGSEQRVEVTECSDGLFCKTLTIPKVIGNDTGAYKCFYRETDLASVIYVYVQDYRSPFIASVSDQHGVVYITENKNKTVVIPCLGSISNLNVSLCARYPEKRFVPDGNRISWDSKKGFTIPSYMISYAGMVFCEAKINDESYQSIMYIVVVVGYRIYDVVLSPSHGIELSVGEKLVLNCTARTELNVGIDFNWEYPSSKHQHKKLVNRDLKTQSGSEMKKFLSTLTIDGVTRSDQGLYTCAASSGLMTKKNSTFVRVHEKPFVAFGSGMESLVEATVGERVRIPAKYLGYPPPEIKWYKNGIPLESNHTIKAGHVLTIMEVSERDTGNYTVILTNPISKEKQSHVVSLVVYVPPQIGEKSLISPVDSYQYGTTQTLTCTVYAIPPPHHIHWYWQLEEECANEPSQAVSVTNPYPCEEWRSVEDFQGGNKIEVNKNQFALIEGKNKTVSTLVIQAANVSALYKCEAVNKVGRGERVISFHVTRGPEITLQPDMQPTEQESVSLWCTADRSTFENLTWYKLGPQPLPIHVGELPTPVCKNLDTLWKLNATMFSNSTNDILIMELKNASLQDQGDYVCLAQDRKTKKRHCVVRQLTVLERVAPTITGNLENQTTSIGESIEVSCTASGNPPPQIMWFKDNETLVEDSGIVLKDGNRNLTIRRVRKEDEGLYTCQACSVLGCAKVEAFFIIEGAQEKTNLEIIILVGTAVIAMFFWLLLVIILRTVKRANGGELKTGYLSIVMDPDELPLDEHCERLPYDASKWEFPRDRLKLGKPLGRGAFGQVIEADAFGIDKTATCRTVAVKMLKEGATHSEHRALMSELKILIHIGHHLNVVNLLGACTKPGGPLMVIVEFCKFGNLSTYLRSKRNEFVPYKTKGARFRQGKDYVGAIPVDLKRRLDSITSSQSSASSGFVEEKSLSDVEEEEAPEDLYKDFLTLEHLICYSFQVAKGMEFLASRKCIHRDLAARNILLSEKNVVKICDFGLARDIYKDPDYVRKGDARLPLKWMAPETIFDRVYTIQSDVWSFGVLLWEIFSLGASPYPGVKIDEEFCRRLKEGTRMRAPDYTTPEMYQTMLDCWHGEPSQRPTFSELVEHLGNLLQANAQQDGKDYIVLPISETLSMEEDSGLSLPTSPVSCMEEEEVCDPKFHYDNTAGISQYLQNSKRKSRPVSVKTFEDIPLEEPEVKVIPDDNQTDSGMVLASEELKTLEDRTKLSPSFGGMVPSKSRESVASEGSNQTSGYQSGYHSDDTDTTVYSSEEAELLKLIEIGVQTGSTAQILQPDSGTTLSSPPV

SEQ ID NO: 114 - protein, 626 aa, Artificial Sequence
  derived and/or modified protein sequence (wt) from Homo sapiens__ENST00000392213.7__MAG
MIFLTALPLFWIMISASRGGHWGAWMPSSISAFEGTCVSIPCRFDFPDELRPAVVHGVWYFNSPYPKNYPPVVFKSRTQVVHESFQGRSRLLGDLGLRNCTLLLSNVSPELGGKYYFRGDLGGYNQYTFSEHSVLDIVNTPNIVVPPEVVAGTEVEVSCMVPDNCPELRPELSWLGHEGLGEPAVLGRLREDEGTWVQVSLLHFVPTREANGHRLGCQASFPNTTLQFEGYASMDVKYPPVIVEMNSSVEAIEGSHVSLLCGADSNPPPLLTWMRDGTVLREAVAESLLLELEEVTPAEDGVYACLAENAYGQDNRTVGLSVMYAPWKPTVNGTMVAVEGETVSILCSTQSNPDPILTIFKEKQILSTVIYESELQLELPAVSPEDDGEYWCVAENQYGQRATAFNLSVEFAPVLLLESHCAAARDTVQCLCVVKSNPEPSVAFELPSRNVTVNESEREFVYSERSGLVLTSILTLRGQAQAPPRVICTARNLYGAKSLELPFQGAHRLMWAKIGPVGAVVAFAILIAIVCYITQTRRKKNVTESPSFSAGDNPPVLFSSDFRISGAPEKYESERRLGSERRLLGLRGEPPELDLSYSHSDLGKRPTKDSYTLTEELAEYAEIRVK

SEQ ID NO: 115 - protein, 601 aa, Artificial Sequence
  derived and/or modified protein sequence (wt) from Homo sapiens__ENST00000537831.2__MAG
MPSSISAFEGTCVSIPCRFDFPDELRPAVVHGVWYFNSPYPKNYPPVVFKSRTQVVHESFQGRSRLLGDLGLRNCTLLLSNVSPELGGKYYFRGDLGGYNQYTFSEHSVLDIVNTPNIVVPPEVVAGTEVEVSCMVPDNCPELRPELSWLGHEGLGEPAVLGRLREDEGTWVQVSLLHFVPTREANGHRLGCQASFPNTTLQFEGYASMDVKYPPVIVEMNSSVEAIEGSHVSLLCGADSNPPPLLTWMRDGTVLREAVAESLLLELEEVTPAEDGVYACLAENAYGQDNRTVGLSVMYAPWKPTVNGTMVAVEGETVSILCSTQSNPDPILTIFKEKQILSTVIYESELQLELPAVSPEDDGEYWCVAENQYGQRATAFNLSVEFAPVLLLESHCAAARDTVQCLCVVKSNPEPSVAFELPSRNVTVNESEREFVYSERSGLVLTSILTLRGQAQAPPRVICTARNLYGAKSLELPFQGAHRLMWAKIGPVGAVVAFAILIAIVCYITQTRRKKNVTESPSFSAGDNPPVLFSSDFRISGAPEKYESERRLGSERRLLGLRGEPPELDLSYSHSDLGKRPTKDSYTLTEELAEYAEIRVK

SEQ ID NO: 116 - protein, 582 aa, Artificial Sequence
  derived and/or modified protein sequence (wt) from Homo sapiens__ENST00000361922.8__MAG
MIFLTALPLFWIMISASRGGHWGAWMPSSISAFEGTCVSIPCRFDFPDELRPAVVHGVWYFNSPYPKNYPPVVFKSRTQVVHESFQGRSRLLGDLGLRNCTLLLSNVSPELGGKYYFRGDLGGYNQYTFSEHSVLDIVNTPNIVVPPEVVAGTEVEVSCMVPDNCPELRPELSWLGHEGLGEPAVLGRLREDEGTWVQVSLLHFVPTREANGHRLGCQASFPNTTLQFEGYASMDVKYPPVIVEMNSSVEAIEGSHVSLLCGADSNPPPLLTWMRDGTVLREAVAESLLLELEEVTPAEDGVYACLAENAYGQDNRTVGLSVMYAPWKPTVNGTMVAVEGETVSILCSTQSNPDPILTIFKEKQILSTVIYESELQLELPAVSPEDDGEYWCVAENQYGQRATAFNLSVEFAPVLLLESHCAAARDTVQCLCVVKSNPEPSVAFELPSRNVTVNESEREFVYSERSGLVLTSILTLRGQAQAPPRVICTARNLYGAKSLELPFQGAHRLMWAKIGPVGAVVAFAILIAIVCYITQTRRKKNVTESPSFSAGDNPPVLFSSDFRISGAPEKYESKEVSTLESH

SEQ ID NO: 117 - protein, 58 aa, Artificial Sequence
  derived and/or modified protein sequence (wt) from Homo sapiens__ENST00000597035.5__MAG
MIFLTALPLFWIMISASRGGHWGAWMPSSISAFEGTCVSIPCRFDFPDELRPAVVHGV

SEQ ID NO: 118 - protein, 999 aa, Artificial Sequence
  derived and/or modified protein sequence (wt) from Homo sapiens__ENST00000421804.6__MERTK
MGPAPLPLLLGLFLPALWRRAITEAREEAKPYPLFPGPFPGSLQTDHTPLLSLPHASGYQPALMFSPTQPGRPHTGNVAIPQVTSVESKPLPPLAFKHTVGHIILSEHKGVKFNCSISVPNIYQDTTISWWKDGKELLGAHHAITQFYPDDEVTAIIASFSITSVQRSDNGSYICKMKINNEEIVSDPIYIEVQGLPHFTKQPESMNVTRNTAFNLTCQAVGPPEPVNIFWVQNSSRVNEQPEKSPSVLTVPGLTEMAVFSCEAHNDKGLTVSKGVQINIKAIPSPPTEVSIRNSTAHSILISWVPGFDGYSPFRNCSIQVKEADPLSNGSVMIFNTSALPHLYQIKQLQALANYSIGVSCMNEIGWSAVSPWILASTTEGAPSVAPLNVTVFLNESSDNVDIRWMKPPTKQQDGELVGYRISHVWQSAGISKELLEEVGQNGSRARISVQVHNATCTVRIAAVTRGGVGPFSDPVKIFIPAHGWVDYAPSSTPAPGNADPVLIIFGCFCGFILIGLILYISLAIRKRVQETKFGNAFTEEDSELVVNYIAKKSFCRRAIELTLHSLGVSEELQNKLEDVVIDRNLLILGKILGEGEFGSVMEGNLKQEDGTSLKVAVKTMKLDNSSQREIEEFLSEAACMKDFSHPNVIRLLGVCIEMSSQGIPKPMVILPFMKYGDLHTYLLYSRLETGPKHIPLQTLLKFMVDIALGMEYLSNRNFLHRDLAARNCMLRDDMTVCVADFGLSKKIYSGDYYRQGRIAKMPVKWIAIESLADRVYTSKSDVWAFGVTMWEIATRGMTPYPGVQNHEMYDYLLHGHRLKQPEDCLDELYEIMYSCWRTDPLDRPTFSVLRLQLEKLLESLPDVRNQADVIYVNTQLLESSEGLAQGSTLAPLDLNIDPDSIIASCTPRAAISVVTAEVHDSKPHEGRYILNGGSEEWEDLTSAPSAAVTAEKNSVLPGERLVRNGVSWSHSSMLPLGSSLPDELLFADDSSEGSEVLM

SEQ ID NO: 119 - protein, 823 aa, Artificial Sequence
  derived and/or modified protein sequence (wt) from Homo sapiens__ENST00000409780.5__MERTK
MKINNEEIVSDPIYIEVQGLPHFTKQPESMNVTRNTAFNLTCQAVGPPEPVNIFWVQNSSRVNEQPEKSPSVLTVPGLTEMAVFSCEAHNDKGLTVSKGVQINIKAIPSPPTEVSIRNSTAHSILISWVPGFDGYSPFRNCSIQVKEADPLSNGSVMIFNTSALPHLYQIKQLQALANYSIGVSCMNEIGWSAVSPWILASTTEGAPSVAPLNVTVFLNESSDNVDIRWMKPPTKQQDGELVGYRISHVWQSAGISKELLEEVGQNGSRARISVQVHNATCTVRIAAVTRGGVGPFSDPVKIFIPAHGWVDYAPSSTPAPGNADPVLIIFGCFCGFILIGLILYISLAIRKRVQETKFGNAFTEEDSELVVNYIAKKSFCRRAIELTLHSLGVSEELQNKLEDVVIDRNLLILGKILGEGEFGSVMEGNLKQEDGTSLKVAVKTMKLDNSSQREIEEFLSEAACMKDFSHPNVIRLLGVCIEMSSQGIPKPMVILPFMKYGDLHTYLLYSRLETGPKHIPLQTLLKFMVDIALGMEYLSNRNFLHRDLAARNCMLRDDMTVCVADFGLSKKIYSGDYYRQGRIAKMPVKWIAIESLADRVYTSKSDVWAFGVTMWEIATRGMTPYPGVQNHEMYDYLLHGHRLKQPEDCLDELYEIMYSCWRTDPLDRPTFSVLRLQLEKLLESLPDVRNQADVIYVNTQLLESSEGLAQGSTLAPLDLNIDPDSIIASCTPRAAISVVTAEVHDSKPHEGRYILNGGSEEWEDLTSAPSAAVTAEKNSVLPGERLVRNGVSWSHSSMLPLGSSLPDELLFADDSSEGSEVLM

SEQ ID NO: 120 - protein, 588 aa, Artificial Sequence [sequence omitted]

SEQ ID NO: 121 - protein, 96 aa, Artificial Sequence
  derived and/or modified protein sequence (wt) from Homo sapiens__ENST00000439966.5__MERTK
MGPAPLPLLLGLFLPALWRRAITEAREEAKPYPLFPGPFPGSLQTDHTPLLSLPHASGYQPALMFSPTQPGRPHTGNVAIPQHNQCAAFRQWVVYL

SEQ ID NO: 122 - protein, 2215 aa, Artificial Sequence
  derived and/or modified protein sequence (wt) from Homo sapiens__ENST00000409709.8__MYO7A
MVILQQGDHVWMDLRLGQEFDVPIGAVVKLCDSGQVQVVDDEDNEHWISPQNATHIKPMHPTSVHGVEDMIRLGDLNEAGILRNLLIRYRDHLIYTYTGSILVAVNPYQLLSIYSPEHIRQYTNKKIGEMPPHIFAIADNCYFNMKRNSRDQCCIISGESGAGKTESTKLILQFLAAISGQHSWIEQQVLEATPILEAFGNAKTIRNDNSSRFGKYIDIHFNKRGAIEGAKIEQYLLEKSRVCRQALDERNYHVFYCMLEGMSEDQKKKLGLGQASDYNYLAMGNCITCEGRVDSQEYANIRSAMKVLMFTDTENWEISKLLAAILHLGNLQYEARTFENLDACEVLFSPSLATAASLLEVNPPDLMSCLTSRTLITRGETVSTPLSREQALDVRDAFVKGIYGRLFVWIVDKINAAIYKPPSQDVKNSRRSIGLLDIFGFENFAVNSFEQLCINFANEHLQQFFVRHVFKLEQEEYDLESIDWLHIEFTDNQDALDMIANKPMNIISLIDEESKFPKGTDTTMLHKLNSQHKLNANYIPPKNNHETQFGINHFAGIVYYETQGFLEKNRDTLHGDIIQLVHSSRNKFIKQIFQADVAMGAETRKRSPTLSSQFKRSLELLMRTLGACQPFFVRCIKPNEFKKPMLFDRHLCVRQLRYSGMMETIRIRRAGYPIRYSFVEFVERYRVLLPGVKPAYKQGDLRGTCQRMAEAVLGTHDDWQIGKTKIFLKDHHDMLLEVERDKAITDRVILLQKVIRGFKDRSNFLKLKNAATLIQRHWRGHNCRKNYGLMRLGFLRLQALHRSRKLHQQYRLARQRIIQFQARCRAYLVRKAFRHRLWAVLTVQAYARGMIARRLHQRLRAEYLWRLEAEKMRLAEEEKLRKEMSAKKAKEEAERKHQERLAQLAREDAERELKEKEAARRKKELLEQMERARHEPVNHSDMVDKMFGFLGTSGGLPGQEGQAPSGFEDLERGRREMVEEDLDAALPLPDEDEEDLSEYKFAKFAATYFQGTTTHSYTRRPLKQPLLYHDDEGDQLAALAVWITILRFMGDLPEPKYHTAMSDGSEKIPVMTKIYETLGKKTYKRELQALQGEGEAQLPEGQKKSSVRHKLVHLTLKKKSKLTEEVTKRLHDGESTVQGNSMLEDRPTSNLEKLHFIIGNGILRPALRDEIYCQISKQLTHNPSKSSYARGWILVSLCVGCFAPSEKFVKYLRNFIHGGPPGYAPYCEERLRRTFVNGTRTQPPSWLELQATKSKKPIMLPVTFMDGTTKTLLTDSATTAKELCNALADKISLKDRFGFSLYIALFDKVSSLGSGSDHVMDAISQCEQYAKEQGAQERNAPWRLFFRKEVFTPWHSPSEDNVATNLIYQQVVRGVKFGEYRCEKEDDLAELASQQYFVDYGSEMILERLLNLVPTYIPDREITPLKTLEKWAQLAIAAHKKGIYAQRRTDAQKVKEDVVSYARFKWPLLFSRFYEAYKFSGPSLPKNDVIVAVNWTGVYFVDEQEQVLLELSFPEIMAVSSSRECRVWLSLGCSDLGCAAPHSGWAGLTPAGPCSPCWSCRGAKTTAPSFTLATIKGDEYTFTSSNAEDIRDLVVTFLEGLRKRSKYVVALQDNPNPAGEESGFLSFAKGDLIILDHDTGEQVMNSGWANGINERTKQRGDFPTDSVYVMPTVTMPPREIVALVTMTPDQRQDVVRLLQLRTAEPEVRAKPYTLEEFSYDYFRPPPKHTLSRVMVSKARGKDRLWSHTREPLKQALLKKLLGSEELSQEACLAFIAVLKYMGDYPSKRTRSVNELTDQIFEGPLKAEPLKDEAYVQILKQLTDNHIRYSEERGWELLWLCTGLFPPSNILLPHVQRFLQSRKHCPLAIDCLQRLQKALRNGSRKYPPHLVEVEAIQHKTTQIFHKVYFPDDTDEAFEVESSTKAKDFCQNIATRLLLKSSEGFSLFVKIADKVLSVPENDFFFDFVRHLTDWIKKARPIKDGIVPSLTYQVFFMKKLWTTTVPGKDPMADSIFHYYQELPKYLRGYHKCTREEVLQLGALIYRVKFEEDKSYFPSIPKLLRELVPQDLIRQVSPDDWKRSIVAYFNKHAGKSKEEAKLAFLKLIFKWPTFGSAFFEVKQTTEPNFPEILLIAINKYGVSLIDPKTKDILTTHPFTKISNWSSGNTYFHITIGNLVRGSKLLCETSLGYKMDDLLTSYISQMLTAMSKQRGSRSGK

SEQ ID NO: 123 - protein, 2175 aa, Artificial Sequence
  derived and/or modified protein sequence (wt) from Homo sapiens__ENST00000458637.6__MYO7A
MVILQQGDHVWMDLRLGQEFDVPIGAVVKLCDSGQVQVVDDEDNEHWISPQNATHIKPMHPTSVHGVEDMIRLGDLNEAGILRNLLIRYRDHLIYTYTGSILVAVNPYQLLSIYSPEHIRQYTNKKIGEMPPHIFAIADNCYFNMKRNSRDQCCIISGESGAGKTESTKLILQFLAAISGQHSWIEQQVLEATPILEAFGNAKTIRNDNSSRFGKYIDIHFNKRGAIEGAKIEQYLLEKSRVCRQALDERNYHVFYCMLEGMSEDQKKKLGLGQASDYNYLAMGNCITCEGRVDSQEYANIRSAMKVLMFTDTENWEISKLLAAILHLGNLQYEARTFENLDACEVLFSPSLATAASLLEVNPPDLMSCLTSRTLITRGETVSTPLSREQALDVRDAFVKGIYGRLFVWIVDKINAAIYKPPSQDVKNSRRSIGLLDIFGFENFAVNSFEQLCINFANEHLQQFFVRHVFKLEQEEYDLESIDWLHIEFTDNQDALDMIANKPMNIISLIDEESKFPKGTDTTMLHKLNSQHKLNANYIPPKNNHETQFGINHFAGIVYYETQGFLEKNRDTLHGDIIQLVHSSRNKFIKQIFQADVAMGAETRKRSPTLSSQFKRSLELLMRTLGACQPFFVRCIKPNEFKKPMLFDRHLCVRQLRYSGMMETIRIRRAGYPIRYSFVEFVERYRVLLPGVKPAYKQGDLRGTCQRMAEAVLGTHDDWQIGKTKIFLKDHHDMLLEVERDKAITDRVILLQKVIRGFKDRSNFLKLKNAATLIQRHWRGHNCRKNYGLMRLGFLRLQALHRSRKLHQQYRLARQRIIQFQARCRAYLVRKAFRHRLWAVLTVQAYARGMIARRLHQRLRAEYLWRLEAEKMRLAEEEKLRKEMSAKKAKEEAERKHQERLAQLAREDAERELKEKEAARRKKELLEQMERARHEPVNHSDMVDKMFGFLGTSGGLPGQEGQAPSGFEDLERGRREMVEEDLDAALPLPDEDEEDLSEYKFAKFAATYFQGTTTHSYTRRPLKQPLLYHDDEGDQLAALAVWITILRFMGDLPEPKYHTAMSDGSEKIPVMTKIYETLGKKTYKRELQALQGEGEAQLPEGQKKSSVRHKLVHLTLKKKSKLTEEVTKRLHDGESTVQGNSMLEDRPTSNLEKLHFIIGNGILRPALRDEIYCQISKQLTHNPSKSSYARGWILVSLCVGCFAPSEKFVKYLRNFIHGGPPGYAPYCEERLRRTFVNGTRTQPPSWLELQATKSKKPIMLPVTFMDGTTKTLLTDSATTAKELCNALADKISLKDRFGFSLYIALFDKVSSLGSGSDHVMDAISQCEQYAKEQGAQERNAPWRLFFRKEVFTPWHSPSEDNVATNLIYQQVVRGVKFGEYRCEKEDDLAELASQQYFVDYGSEMILERLLNLVPTYIPDREITPLKTLEKWAQLAIAAHKKGIYAQRRTDAQKVKEDVVSYARFKWPLLFSRFYEAYKFSGPSLPKNDVIVAVNWTGVYFVDEQEQVLLELSFPEIMAVSSSRGAKTTAPSFTLATIKGDEYTFTSSNAEDIRDLVVTFLEGLRKRSKYVVALQDNPNPAGEESGFLSFAKGDLIILDHDTGEQVMNSGWANGINERTKQRGDFPTDSVYVMPTVTMPPREIVALVTMTPDQRQDVVRLLQLRTAEPEVRAKPYTLEEFSYDYFRPPPKHTLSRVMVSKARGKDRLWSHTREPLKQALLKKLLGSEELSQEACLAFIAVLKYMGDYPSKRTRSVNELTDQIFEGPLKAEPLKDEAYVQILKQLTDNHIRYSEERGWELLWLCTGLFPPSNILLPHVQRFLQSRKHCPLAIDCLQRLQKALRNGSRKYPPHLVEVEAIQHKTTQIFHKVYFPDDTDEAFEVESSTKAKDFCQNIATRLLLKSSEGFSLFVKIADKVLSVPENDFFFDFVRHLTDWIKKARPIKDGIVPSLTYQVFFMKKLWTTTVPGKDPMADSIFHYYQELPKYLRGYHKCTREEVLQLGALIYRVKFEEDKSYFPSIPKLLRELVPQDLIRQVSPDDWKRSIVAYFNKHAGKSKEEAKLAFLKLIFKWPTFGSAFFEQTTEPNFPEILLIAINKYGVSLIDPKTKDILTTHPFTKISNWSSGNTYFHITIGNLVRGSKLLCETSLGYKMDDLLTSYISQMLTAMSKQRGSRSGK

SEQ ID NO: 124 - protein, 2166 aa, Artificial Sequence
  derived and/or modified protein sequence (wt) from Homo sapiens__ENST00000409619.6__MYO7A
MDLRLGQEFDVPIGAVVKLCDSGQVQVVDDEDNEHWISPQNATHIKPMHPTSVHGVEDMIRLGDLNEAGILRNLLIRYRDHLIYTYTGSILVAVNPYQLLSIYSPEHIRQYTNKKIGEMPPHIFAIADNCYFNMKRNSRDQCCIISGESGAGKTESTKLILQFLAAISGQHSWIEQQVLEATPILEAFGNAKTIRNDNSSRFGKYIDIHFNKRGAIEGAKIEQYLLEKSRVCRQALDERNYHVFYCMLEGMSEDQKKKLGLGQASDYNYLAMGNCITCEGRVDSQEYANIRSAMKVLMFTDTENWEISKLLAAILHLGNLQYEARTFENLDACEVLFSPSLATAASLLEVNPPDLMSCLTSRTLITRGETVSTPLSREQALDVRDAFVKGIYGRLFVWIVDKINAAIYKPPSQDVKNSRRSIGLLDIFGFENFAVNSFEQLCINFANEHLQQFFVRHVFKLEQEEYDLESIDWLHIEFTDNQDALDMIANKPMNIISLIDEESKFPKGTDTTMLHKLNSQHKLNANYIPPKNNHETQFGINHFAGIVYYETQGFLEKNRDTLHGDIIQLVHSSRNKFIKQIFQADVAMGAETRKRSPTLSSQFKRSLELLMRTLGACQPFFVRCIKPNEFKKPMLFDRHLCVRQLRYSGMMETIRIRRAGYPIRYSFVEFVERYRVLLPGVKPAYKQGDLRGTCQRMAEAVLGTHDDWQIGKTKIFLKDHHDMLLEVERDKAITDRVILLQKVIRGFKDRSNFLKLKNAATLIQRHWRGHNCRKNYGLMRLGFLRLQALHRSRKLHQQYRLARQRIIQFQARCRAYLVRKAFRHRLWAVLTVQAYARGMIARRLHQRLRAEYLWRLEAEKMRLAEEEKLRKEMSAKKAKEEAERKHQERLAQLAREDAERELKEKEAARRKKELLEQMERARHEPVNHSDMVDKMFGFLGTSGGLPGQEGQAPSGFEDLERGRREMVEEDLDAALPLPDEDEEDLSEYKFAKFAATYFQGTTTHSYTRRPLKQPLLYHDDEGDQLAALAVWITILRFMGDLPEPKYHTAMSDGSEKIPVMTKIYETLGKKTYKRELQALQGEGEAQLPEGQKKSSVRHKLVHLTLKKKSKLTEEVTKRLHDGESTVQGNSMLEDRPTSNLEKLHFIIGNGILRPALRDEIYCQISKQLTHNPSKSSYARGWILVSLCVGCFAPSEKFVKYLRNFIHGGPPGYAPYCEERLRRTFVNGTRTQPPSWLELQATKSKKPIMLPVTFMDGTTKTLLTDSATTAKELCNALADKISLKDRFGFSLYIALFDKVSSLGSGSDHVMDAISQCEQYAKEQGAQERNAPWRLFFRKEVFTPWHSPSEDNVATNLIYQQVVRGVKFGEYRCEKEDDLAELASQQYFVDYGSEMILERLLNLVPTYIPDREITPLKTLEKWAQLAIAAHKKGIYAQRRTDAQKVKEDVVSYARFKWPLLFSRFYEAYKFSGPSLPKNDVIVAVNWTGVYFVDEQEQVLLELSFPEIMAVSSSRGAKTTAPSFTLATIKGDEYTFTSSNAEDIRDLVVTFLEGLRKRSKYVVALQDNPNPAGEESGFLSFAKGDLIILDHDTGEQVMNSGWANGINERTKQRGDFPTDSVYVMPTVTMPPREIVALVTMTPDQRQDVVRLLQLRTAEPEVRAKPYTLEEFSYDYFRPPPKHTLSRVMVSKARGKDRLWSHTREPLKQALLKKLLGSEELSQEACLAFIAVLKYMGDYPSKRTRSVNELTDQIFEGPLKAEPLKDEAYVQILKQLTDNHIRYSEERGWELLWLCTGLFPPSNILLPHVQRFLQSRKHCPLAIDCLQRLQKALRNGSRKYPPHLVEVEAIQHKTTQIFHKVYFPDDTDEAFEVESSTKAKDFCQNIATRLLLKSSEGFSLFVKIADKVLSVPENDFFFDFVRHLTDWIKKARPIKDGIVPSLTYQVFFMKKLWTTTVPGKDPMADSIFHYYQELPKYLRGYHKCTREEVLQLGALIYRVKFEEDKSYFPSIPKLLRELVPQDLIRQVSPDDWKRSIVAYFNKHAGKSKEEAKLAFLKLIFKWPTFGSAFFEVKQTTEPNFPEILLIAINKYGVSLIDPKTKDILTTHPFTKISNWSSGNTYFHITIGNLVRGSKLLCETSLGYKMDDLLTSYISQMLTAMSKQRGSRSGK

SEQ ID NO: 125 - protein, 1198 aa, Artificial Sequence
  derived and/or modified protein sequence (wt) from Homo sapiens__ENST00000620575.4__MYO7A
MVILQQGDHVWMDLRLGQEFDVPIGAVVKLCDSGQVQVVDDEDNEHWISPQNATHIKPMHPTSVHGVEDMIRLGDLNEAGILRNLLIRYRDHLIYTYTGSILVAVNPYQLLSIYSPEHIRQYTNKKIGEMPPHIFAIADNCYFNMKRNSRDQCCIISGESGAGKTESTKLILQFLAAISGQHSWIEQQVLEATPILEAFGNAKTIRNDNSSRFGKYIDIHFNKRGAIEGAKIEQYLLEKSRVCRQALDERNYHVFYCMLEGMSEDQKKKLGLGQASDYNYLAMGNCITCEGRVDSQEYANIRSAMKVLMFTDTENWEISKLLAAILHLGNLQYEARTFENLDACEVLFSPSLATAASLLEVNPPDLMSCLTSRTLITRGETVSTPLSREQALDVRDAFVKGIYGRLFVWIVDKINAAIYKPPSQDVKNSRRSIGLLDIFGFENFAVNSFEQLCINFANEHLQQFFVRHVFKLEQEEYDLESIDWLHIEFTDNQDALDMIANKPMNIISLIDEESKFPKGTDTTMLHKLNSQHKLNANYIPPKNNHETQFGINHFAGIVYYETQGFLEKNRDTLHGDIIQLVHSSRNKFIKQIFQADVAMGAETRKRSPTLSSQFKRSLELLMRTLGACQPFFVRCIKPNEFKKPMLFDRHLCVRQLRYSGMMETIRIRRAGYPIRYSFVEFVERYRVLLPGVKPAYKQGDLRGTCQRMAEAVLGTHDDWQIGKTKIFLKDHHDMLLEVERDKAITDRVILLQKVIRGFKDRSNFLKLKNAATLIQRHWRGHNCRKNYGLMRLGFLRLQALHRSRKLHQQYRLARQRIIQFQARCRAYLVRKAFRHRLWAVLTVQAYARGMIARRLHQRLRAEYLWRLEAEKMRLAEEEKLRKEMSAKKAKEEAERKHQERLAQLAREDAERELKEKEAARRKKELLEQMERARHEPVNHSDMVDKMFGFLGTSGGLPGQEGQAPSGFEDLERGRREMVEEDLDAALPLPDEDEEDLSEYKFAKFAATYFQGTTTHSYTRRPLKQPLLYHDDEGDQLAALAVWITILRFMGDLPEPKYHTAMSDGSEKIPVMTKIYETLGKKTYKRELQALQGEGEVLQAQLPEGQKKSSVRHKLVHLTLKKKSKLTEEVTKRLHDGESTVQGNSMLEDRPTSNLEKLHFIIGNGILRTPGPESLLVAEWCLCQPSKRLSRPGFGFAAS

SEQ ID NO: 126 - protein, 533 aa, Artificial Sequence
  derived and/or modified protein sequence (wt) from Homo sapiens__ENST00000409893.6__MYO7A
MFDRHLCVRQLRYSGMMETIRIRRAGYPIRYSFVEFVERYRVLLPGVKPAYKQGDLRGTCQRMAEAVLGTHDDWQIGKTKIFLKDHHDMLLEVERDKAITDRVILLQKVIRGFKDRSNFLKLKNAATLIQRHWRGHNCRKNYGLMRLGFLRLQALHRSRKLHQQYRLARQRIIQFQARCRAYLVRKAFRHRLWAVLTVQAYARGMIARRLHQRLRAEYLWRLEAEKMRLAEEEKLRKEMSAKKAKEEAERKHQERLAQLAREDAERELKEKEAARRKKELLEQMERARHEPVNHSDMVDKMFGFLGTSGGLPGQEGQAPSGFEDLERGRREMVEEDLDAALPLPDEDEEDLSEYKFAKFAATYFQGTTTHSYTRRPLKQPLLYHDDEGDQLAALAVWITILRFMGDLPEPKYHTAMSDGSEKIPVMTKIYETLGKKTYKRELQALQGEGEAQLPEGQKKSSVRHKLVHLTLKKKSKLTEEVTKRLHDGESTVQGNSMLEDRPTSNLEKLHFIIGNGILRPALRSVPGGGDTRA

SEQ ID NO: 127 - protein, 504 aa, Artificial Sequence
  derived and/or modified protein sequence (wt) from Homo sapiens__ENST00000037502.10__MYOC
MRFFCARCCSFGPEMPAVQLLLLACLVWDVGARTAQLRKANDQSGRCQYTFSVASPNESSCPEQSQAMSVIHNLQRDSSTQRLDLEATKARLSSLESLLHQLTLDQAARPQETQEGLQRELGTLRRERDQLETQTRELETAYSNLLRDKSVLEEEKKRLRQENENLARRLESSSQEVARLRRGQCPQTRDTARAVPPGSREVSTWNLDTLAFQELKSELTEVPASRILKESPSGYLRSGEGDTGCGELVWVGEPLTLRTAETITGKYGVWMRDPKPTYPYTQETTWRIDTVGTDVRQVFEYDLISQFMQGYPSKVHILPRPLESTGAVVYSGSLYFQGAESRTVIRYELNTETVKAEKEIPGAGYHGQFPYSWGGYTDIDLAVDEAGLWVIYSTDEAKGAIVLSKLNPENLELEQTWETNIRKQSVANAFIICGTLYTVSSYTSADATVNFAYDTGTGISKTLTIPFKNRYKYSSMIDYNPLEKKLFAWDNLNMVTYDIKLSKM

SEQ ID NO: 128 - protein, 63 aa, Artificial Sequence
  derived and/or modified protein sequence (wt) from Homo sapiens__ENST00000638471.1__MYOC
MRFFCARCCSFGPEMPAVQLLLLACLVWDVGARTAQLRKANDQRSFYVEFGHFGLPGTEVRAN

SEQ ID NO: 129 - protein, 2005 aa, Artificial Sequence
  derived and/or modified protein sequence (wt) from Homo sapiens__ENST00000437843.2__NOTCH4
MQPPSLLLLLLLLLLLLLCVSVVRPRGLLCGSFPEPCANGGTCLSLSLGQGTCQCAPGFLGETCQFPDPCQNAQLCQNGGSCQALLPAPLGLPSSPSPLTPSFLCTCLPGFTGERCQAQLEDPCPPSFCSKRGRCHIQASGRPQCSCMPGWTGEQCQLRDFCSANPCVNGGVCLATYPQIQCHCPPGFEGHACERDVNECFQDPGPCPKGTSCHNTLGSFQCLCPVGQEGPRCELRAGPCPPRGCSNGGTCQLMPEKDSTFHLCLCPPGFIGPDCEVNPDNCVSHQCQNGGTCQDGLDTYTCLCPETWTGWDCSEDVDECEAQGPPHCRNGGTCQNSAGSFHCVCVSGWGGTSCEENLDDCIAATCAPGSTCIDRVGSFSCLCPPGRTGLLCHLEDMCLSQPCHGDAQCSTNPLTGSTLCLCQPGYSGPTCHQDLDECLMAQQGPSPCEHGGSCLNTPGSFNCLCPPGYTGSRCEADHNECLSQPCHPGSTCLDLLATFHCLCPPGLEGQLCEVETNECASAPCLNHADCHDLLNGFQCICLPGFSGTRCEEDIDECRSSPCANGGQCQDQPGAFHCKCLPGFEGPRCQTEVDECLSDPCPVGASCLDLPGAFFCLCPSGFTGQLCEVPLCAPNLCQPKQICKDQKDKANCLCPDGSPGCAPPEDNCTCHHGHCQRSSCVCDVGWTGPECEAELGGCISAPCAHGGTCYPQPSGYNCTCPTGYTGPTCSEEMTACHSGPCLNGGSCNPSPGGYYCTCPPSHTGPQCQTSTDYCVSAPCFNGGTCVNRPGTFSCLCAMGFQGPRCEGKLRPSCADSPCRNRATCQDSPQGPRCLCPTGYTGGSCQTLMDLCAQKPCPRNSHCLQTGPSFHCLCLQGWTGPLCNLPLSSCQKAALSQGIDVSSLCHNGGLCVDSGPSYFCHCPPGFQGSLCQDHVNPCESRPCQNGATCMAQPSGYLCQCAPGYDGQNCSKELDACQSQPCHNHGTCTPKPGGFHCACPPGFVGLRCEGDVDECLDQPCHPTGTAACHSLANAFYCQCLPGHTGQWCEVEIDPCHSQPCFHGGTCEATAGSPLGFICHCPKGFEGPTCSHRAPSCGFHHCHHGGLCLPSPKPGFPPRCACLSGYGGPDCLTPPAPKGCGPPSPCLYNGSCSETTGLGGPGFRCSCPHSSPGPRCQKPGAKGCEGRSGDGACDAGCSGPGGNWDGGDCSLGVPDPWKGCPSHSRCWLLFRDGQCHPQCDSEECLFDGYDCETPPACTPAYDQYCHDHFHNGHCEKGCNTAECGWDGGDCRPEDGDPEWGPSLALLVVLSPPALDQQLFALARVLSLTLRVGLWVRKDRDGRDMVYPYPGARAEEKLGGTRDPTYQERAAPQTQPLGKETDSLSAGFVVVMGVDLSRCGPDHPASRCPWDPGLLLRFLAAMAAVGALEPLLPGPLLAVHPHAGTAPPANQLPWPVLCSPVAGVILLALGALLVLQLIRRRRREHGALWLPPGFTRRPRTQSAPHRRRPPLGEDSIGLKALKPKAEVDEDGVVMCSGPEEGEEVGQAEETGPPSTCQLWSLSGGCGALPQAAMLTPPQESEMEAPDLDTRGPDGVTPLMSAVCCGEVQSGTFQGAWLGCPEPWEPLLDGGACPQAHTVGTGETPLHLAARFSRPTAARRLLEAGANPNQPDRAGRTPLHAAVAADAREVCQLLLRSRQTAVDARTEDGTTPLMLAARLAVEDLVEELIAAQADVGARDKWGKTALHWAAAVNNARAARSLLQAGADKDAQDNREQTPLFLAAREGAVEVAQLLLGLGAARELRDQAGLAPADVAHQRNHWDLLTLLEGAGPPEARHKATPGREAGPFPRARTVSVSVPPHGGGALPRCRTLSAGAGPRGGGACLQARTWSVDLAARGGGAYSHCRSLSGVGAGGGPTPRGRRFSAGMRGPRPNPAIMRGRYGVAAGRGGRVSTDDWPCDWVALGACGSASNIPIPPPCLTPSPERGSPQLDCGPPALQEMPINQGGEGKK

SEQ ID NO: 130 - protein, 2003 aa, Artificial Sequence
  derived and/or modified protein sequence (wt) from Homo sapiens__ENST00000375023.3__NOTCH4
MQPPSLLLLLLLLLLLCVSVVRPRGLLCGSFPEPCANGGTCLSLSLGQGTCQCAPGFLGETCQFPDPCQNAQLCQNGGSCQALLPAPLGLPSSPSPLTPSFLCTCLPGFTGERCQAKLEDPCPPSFCSKRGRCHIQASGRPQCSCMPGWTGEQCQLRDFCSANPCVNGGVCLATYPQIQCHCPPGFEGHACERDVNECFQDPGPCPKGTSCHNTLGSFQCLCPVGQEGPRCELRAGPCPPRGCSNGGTCQLMPEKDSTFHLCLCPPGFIGPDCEVNPDNCVSHQCQNGGTCQDGLDTYTCLCPETWTGWDCSEDVDECETQGPPHCRNGGTCQNSAGSFHCVCVSGWGGTSCEENLDDCIAATCAPGSTCIDRVGSFSCLCPPGRTGLLCHLEDMCLSQPCHGDAQCSTNPLTGSTLCLCQPGYSGPTCHQDLDECLMAQQGPSPCEHGGSCLNTPGSFNCLCPPGYTGSRCEADHNECLSQPCHPGSTCLDLLATFHCLCPPGLEGQLCEVETNECASAPCLNHADCHDLLNGFQCICLPGFSGTRCEEDIDECRSSPCANGGQCQDQPGAFHCKCLPGFEGPRCQTEVDECLSDPCPVGASCLDLPGAFFCLCPSGFTGQLCEVPLCAPNLCQPKQICKDQKDKANCLCPDGSPGCAPPEDNCTCHHGHCQRSSCVCDVGWTGPECEAELGGCISAPCAHGGTCYPQPSGYNCTCPTGYTGPTCSEEMTACHSGPCLNGGSCNPSPGGYYCTCPPSHTGPQCQTSTDYCVSAPCFNGGTCVNRPGTFSCLCAMGFQGPRCEGKLRPSCADSPCRNRATCQDSPQGPRCLCPTGYTGGSCQTLMDLCAQKPCPRNSHCLQTGPSFHCLCLQGWTGPLCNLPLSSCQKAALSQGIDVSSLCHNGGLCVDSGPSYFCHCPPGFQGSLCQDHVNPCESRPCQNGATCMAQPSGYLCQCAPGYDGQNCSKELDACQSQPCHNHGTCTPKPGGFHCACPPGFVGLRCEGDVDECLDQPCHPTGTAACHSLANAFYCQCLPGHTGQWCEVEIDPCHSQPCFHGGTCEATAGSPLGFICHCPKGFEGPTCSHRAPSCGFHHCHHGGLCLPSPKPGFPPRCACLSGYGGPDCLTPPAPKGCGPPSPCLYNGSCSETTGLGGPGFRCSCPHSSPGPRCQKPGAKGCEGRSGDGACDAGCSGPGGNWDGGDCSLGVPDPWKGCPSHSRCWLLFRDGQCHPQCDSEECLFDGYDCETPPACTPAYDQYCHDHFHNGHCEKGCNTAECGWDGGDCRPEDGDPEWGPSLALLVVLSPPALDQQLFALARVLSLTLRVGLWVRKDRDGRDMVYPYPGARAEEKLGGTRDPTYQERAAPQTQPLGKETDSLSAGFVVVMGVDLSRCGPDHPASRCPWDPGLLLRFLAAMAAVGALEPLLPGPLLAVHPHAGTAPPANQLPWPVLCSPVAGVILLALGALLVLQLIRRRRREHGALWLPPGFTRRPRTQSAPHRRRPPLGEDSIGLKALKPKAEVDEDGVVMCSGPEEGEEVGQAEETGPPSTCQLWSLSGGCGALPQAAMLTPPQESEMEAPDLDTRGPDGVTPLMSAVCCGEVQSGTFQGAWLGCPEPWEPLLDGGACPQAHTVGTGETPLHLAARFSRPTAARRLLEAGANPNQPDRAGRTPLHAAVAADAREVCQLLLRSRQTAVDARTEDGTTPLMLAARLAVEDLVEELIAAQADVGARDKWGKTALHWAAAVNNARAARSLLQAGADKDAQDNREQTPLFLAAREGAVEVAQLLLGLGAARELRDQAGLAPADVAHQRNHWDLLTLLEGAGPPEARHKATPGREAGPFPRARTVSVSVPPHGGGALPRCRTLSAGAGPRGGGACLQARTWSVDLAARGGGAYSHCRSLSGVGAGGGPTPRGRRFSAGMRGPRPNPAIMRGRYGVAAGRGGRVSTDDWPCDWVALGACGSASNIPIPPPCLTPSPERGSPQLDCGPPALQEMPINQGGEGKK

SEQ ID NO: 131 - protein, 2003 aa, Artificial Sequence
  derived and/or modified protein sequence (wt) from Homo sapiens__ENST00000439349.2__NOTCH4
MQPPSLLLLLLLLLLLCVSVVRPRGLLCGSFPEPCANGGTCLSLSLGQGTCQCAPGFLGETCQFPDPCQNAQLCQNGGSCQALLPAPLGLPSSPSPLTPSFLCTCLPGFTGERCQAQLEDPCPPSFCSKRGRCHIQASGRPQCSCMPGWTGEQCQLRDFCSANPCVNGGVCLATYPQIQCHCPPGFEGHACERDVNECFQDPGPCPKGTSCHNTLGSFQCLCPVGQEGPRCELRAGPCPPRGCSNGGTCQLMPEKDSTFHLCLCPPGFIGPDCEVNPDNCVSHQCQNGGTCQDGLDTYTCLCPETWTGWDCSEDVDECETQGPPHCRNGGTCQNSAGSFHCVCVSGWGGTSCEENLDDCIAATCAPGSTCIDRVGSFSCLCPPGRTGLLCHLEDMCLSQPCHGDAQCSTNPLTGSTLCLCQPGYSGPTCHQDLDECLMAQQGPSPCEHGGSCLNTPGSFNCLCPPGYTGSRCEADHNECLSQPCHPGSTCLDLLATFHCLCPPGLEGQLCEVETNECASAPCLNHADCHDLLNGFQCICLPGFSGTRCEEDIDECRSSPCANGGQCQDQPGAFHCKCLPGFEGPRCQTEVDECLSDPCPVGASCLDLPGAFFCLCPSGFTGQLCEVPLCAPNLCQPKQICKDQKDKANCLCPDGSPGCAPPEDNCTCHHGHCQRSSCVCDVGWTGPECEAELGGCISAPCAHGGTCYPQPSGYNCTCPTGYTGPTCSEEMTACHSGPCLNGGSCNPSPGGYYCTCPPSHTGPQCQTSTDYCVSAPCFNGGTCVNRPGTFSCLCAMGFQGPRCEGKLRPSCADSPCRNRATCQDSPQGPRCLCPTGYTGGSCQTLMDLCAQKPCPRNSHCLQTGPSFHCLCLQGWTGPLCNLPLSSCQKAALSQGIDVSSLCHNGGLCVDSGPSYFCHCPPGFQGSLCQDHVNPCESRPCQNGATCMAQPSGYLCQCAPGYDGQNCSKELDACQSQPCHNHGTCTPKPGGFHCACPPGFVGLRCEGDVDECLDQPCHPTGTAACHSLANAFYCQCLPGHTGQWCEVEIDPCHSQPCFHGGTCEATAGSPLGFICHCPKGFEGPTCSHRAPSCGFHHCHHGGLCLPSPKPGFPPRCACLSGYGGPDCLTPPAPKGCGPPSPCLYNGSCSETTGLGGPGFRCSCPHSSPGPRCQKPGAKGCEGRSGDGACDAGCSGPGGNWDGGDCSLGVPDPWKGCPSHSRCWLLFRDGQCHPQCDSEECLFDGYDCETPPACTPAYDQYCHDHFHNGHCEKGCNTAECGWDGGDCRPEDGDPEWGPSLALLVVLSPPALDQQLFALARVLSLTLRVGLWVRKDRDGRDMVYPYPGARAEEKLGGTRDPTYQERAAPQTQPLGKETDSLSAGFVVVMGVDLSRCGPDHPASRCPWDPGLLLRFLAAMAAVGALEPLLPGPLLAVHPHAGTAPPANQLPWPVLCSPVAGVILLALGALLVLQLIRRRRREHGALWLPPGFTRRPRTQSAPHRRRPPLGEDSIGLKALKPKAEVDEDGVVMCSGPEEGEEVGQAEETGPPSTCQLWSLSGGCGALPQAAMLTPPQESEMEAPDLDTRGPDGVTPLMSAVCCGEVQSGTFQGAWLGCPEPWEPLLDGGACPQAHTVGTGETPLHLAARFSRPTAARRLLEAGANPNQPDRAGRTPLHAAVAADAREVCQLLLRSRQTAVDARTEDGTTPLMLAARLAVEDLVEELIAAQADVGARDKWGKTALHWAAAVNNARAARSLLQAGADKDAQDNREQTPLFLAAREGAVEVAQLLLGLGAARELRDQAGLAPADVAHQRNHWDLLTLLEGAGPPEARHKATPGREAGPFPRARTVSVSVPPHGGGALPRCRTLSAGAGPRGGGACLQARTWSVDLAARGGGAYSHCRSLSGVGAGGGPTPRGRRFSAGMRGPRPNPAIMRGRYGVAAGRGGRVSTDDWPCDWVALGACGSASNIPIPPPCLTPSPERGSPQLDCGPPALQEMPINQGGEGKK

SEQ ID NO: 132 - protein, 2003 aa, Artificial Sequence
  derived and/or modified protein sequence (wt) from Homo sapiens__ENST00000383264.4__NOTCH4
MQPPSLLLLLLLLLLLCVSVVRPRGLLCGSFPEPCANGGTCLSLSLGQGTCQCAPGFLGETCQFPDPCQNAQLCQNGGSCQALLPAPLGLPSSPSPLTPSFLCTCLPGFTGERCQAKLEDPCPPSFCSKRGRCHIQASGRPQCSCMPGWTGEQCQLRDFCSANPCVNGGVCLATYPQIQCHCPPGFEGHACERDVNECFQDPGPCPKGTSCHNTLGSFQCLCPVGQEGPRCELRAGPCPPRGCSNGGTCQLMPEKDSTFHLCLCPPGFIGPDCEVNPDNCVSHQCQNGGTCQDGLDTYTCLCPETWTGWDCSEDVDECETQGPPHCRNGGTCQNSAGSFHCVCVSGWGGTSCEENLDDCIAATCAPGSTCIDRVGSFSCLCPPGRTGLLCHLEDMCLSQPCHGDAQCSTNPLTGSTLCLCQPGYSGPTCHQDLDECLMAQQGPSPCEHGGSCLNTPGSFNCLCPPGYTGSRCEADHNECLSQPCHPGSTCLDLLATFHCLCPPGLEGQLCEVETNECASAPCLNHADCHDLLNGFQCICLPGFSGTRCEEDIDECRSSPCANGGQCQDQPGAFHCKCLPGFEGPRCQTEVDECLSDPCPVGASCLDLPGAFFCLCPSGFTGQLCEVPLCAPNLCQPKQICKDQKDKANCLCPDGSPGCAPPEDNCTCHHGHCQRSSCVCDVGWTGPECEAELGGCISAPCAHGGTCYPQPSGYNCTCPTGYTGPTCSEEMTACHSGPCLNGGSCNPSPGGYYCTCPPSHTGPQCQTSTDYCVSAPCFNGGTCVNRPGTFSCLCAMGFQGPRCEGKLRPSCADSPCRNRATCQDSPQGPRCLCPTVYTGGSCQTLMDLCAQKPCPRNSHCLQTGPSFHCLCLQGWTGPLCNLPLSSCQKAALSQGIDVSSLCHNGGLCVDSGPSYFCHCPPGFQGSLCQDHVNPCESRPCQNGATCMAQPSGYLCQCAPGYDGQNCSKELDACQSQPCHNHGTCTPKPGGFHCACPPGFVGLRCEGDVDECLDQPCHPTGTAACHSLANAFYCQCLPGHTGQWCEVEIDPCHSQPCFHGGTCEATAGSPLGFICHCPKGFEGPTCSHRAPSCGFHHCHHGGLCLPSPKPGFPPRCACLSGYGGPDCLTPPAPKGCGPPSPCLYNGSCSETTGLGGPGFRCSCPHSSPGPRCQKPGAKGCEGRSGDGACDAGCSGPGGNWDGGDCSLGVPDPWKGCPSHSRCWLLFRDGQCHPQCDSEECLFDGYDCETPPACTPAYDQYCHDHFHNGHCEKGCNTAECGWDGGDCRPEDGDPEWGPSLALLVVLSPPALDQQLFALARVLSLTLRVGLWVRKDRDGRDMVYPYPGARAEEKLGGTRDPTYQERAAPQTQPLGKETDSLSAGFVVVMGVDLSRCGPDHPASRCPWDPGLLLRFLAAMAAVGALEPLLPGPLLAVHPHAGTAPPANQLPWPVLCSPVAGVILLALGALLVLQLIRRRRREHGALWLPPGFTRRPRTQSAPHRRRPPLGEDSIGLKALKPKAEVDEDGVVMCSGPEEGEEVGQAEETGPPSTCQLWSLSGGCGALPQAAMLTPPQESEMEAPDLDTRGPDGVTPLMSAVCCGEVQSGTFQGAWLGCPEPWEPLLDGGACPQAHTVGTGETPLHLAARFSRPTAARRLLEAGANPNQPDRAGRTPLHAAVAADAREVCQLLLRSRQTAVDARTEDGTTPLMLAARLAVEDLVEELIAAQADVGARDKWGKTALHWAAAVNNARAARSLLQAGADKDAQDNREQTPLFLAAREGAVEVAQLLLGLGAARELRDQAGLAPADVAHQRNHWDLLTLLEGAGPPEARHKATPGREAGPFPRARTVSVSVPPHGGGALPRCRTLSAGAGPRGGGACLQARTWSVDLAARGGGAYSHCRSLSGVGAGGGPTPRGRRFSAGMRGPRPNPAIMRGRYGVAAGRGGRVSTDDWPCDWVALGACGSASNIPIPPPCLTPSPERGSPQLDCGPPALQEMPINQGGEGKK

SEQ ID NO: 133 - protein, 2002 aa, Artificial Sequence
  derived and/or modified protein sequence (wt) from Homo sapiens__ENST00000454571.2__NOTCH4
MQPPSLLLLLLLLLLCVSVVRPRGLLCGSFPEPCANGGTCLSLSLGQGTCQCAPGFLGETCQFPDPCQNAQLCQNGGSCQALLPAPLGLPSSPSPLTPSFLCTCLPGFTGERCQAQLEDPCPPSFCSKRGRCHIQASGRPQCSCMPGWTGEQCQLRDFCSANPCVNGGVCLATYPQIQCHCPPGFEGHACERDVNECFQDPGPCPKGTSCHNTLGSFQCLCPVGQEGPRCELRAGPCPPRGCSNGGTCQLMPEKDSTFHLCLCPPGFIGPDCEVNPDNCVSHQCQNGGTCQDGLDTYTCLCPETWTGWDCSEDVDECETQGPPHCRNGGTCQNSAGSFHCVCVSGWGGTSCEENLDDCIAATCAPGSTCIDRVGSFSCLCPPGRTGLLCHLEDMCLSQPCHGDAQCSTNPLTGSTLCLCQPGYSGPTCHQDLDECLMAQQGPSPCEHGGSCLNTPGSFNCLCPPGYTGSRCEADHNECLSQPCHPGSTCLDLLATFHCLCPPGLEGQLCEVETNECASAPCLNHADCHDLLNGFQCICLPGFSGTRCEEDIDECRSSPCANGGQCQDQPGAFHCKCLPGFEGPRCQTEVDECLSDPCPVGASCLDLPGAFFCLCPSGFTGQLCEVPLCAPNLCQPKQICKDQKDKANCLCPDGSPGCAPPEDNCTCHHGHCQRSSCVCDVGWTGPECEAELGGCISAPCAHGGTCYPQPSGYNCTCPTGYTGPTCSEEMTACHSGPCLNGGSCNPSPGGYYCTCPPSHTGPQCQTSTDYCVSAPCFNGGTCVNRPGTFSCLCAMGFQGPRCEGKLRPSCADSPCRNRATCQDSPQGPRCLCPTGYTGGSCQTLMDLCAQKPCPRNSHCLQTGPSFHCLCLQGWTGPLCNLPLSSCQKAALSQGIDVSSLCHNGGLCVDSGPSYFCHCPPGFQGSLCQDHVNPCESRPCQNGATCMAQPSGYLCQCAPGYDGQNCSKELDACQSQPCHNHGTCTPKPGGFHCACPPGFVGLRCEGDVDECLDQPCHPTGTAACHSLANAFYCQCLPGHTGQWCEVEIDPCHSQPCFHGGTCEATAGSPLGFICHCPKGFEGPTCSHRAPSCGFHHCHHGGLCLPSPKPGFPPRCACLSGYGGPDCLTPPAPKGCGPPSPCLYNGSCSETTGLGGPGFRCSCPHSSPGPRCQKPGAKGCEGRSGDGACDAGCSGPGGNWDGGDCSLGVPDPWKGCPSHSRCWLLFRDGQCHPQCDSEECLFDGYDCETPPACTPAYDQYCHDHFHNGHCEKGCNTAECGWDGGDCRPEDGDPEWGPSLALLVVLSPPALDQQLFALARVLSLTLRVGLWVRKDRDGRDMVYPYPGARAEEKLGGTRDPTYQERAAPQTQPLGKETDSLSAGFVVVMGVDLSRCGPDHPASRCPWDPGLLLRFLAAMAAVGALEPLLPGPLLAVHPHAGTAPPANQLPWPVLCSPVAGVILLALGALLVLQLIRRRRREHGALWLPPGFTRRPRTQSAPHRRRPPLGEDSIGLKALKPKAEVDEDGVVMCSGPEEGEEVGQAEETGPPSTCQLWSLSGGCGALPQAAMLTPPQESEMEAPDLDTRGPDGVTPLMSAVCCGEVQSGTFQGAWLGCPEPWEPLLDGGACPQAHTVGTGETPLHLAARFSRPTAARRLLEAGANPNQPDRAGRTPLHAAVAADAREVCQLLLRSRQTAVDARTEDGTTPLMLAARLAVEDLVEELIAAQADVGARDKWGKTALHWAAAVNNARAARSLLQAGADKDAQDNREQTPLFLAAREGAVEVAQLLLGLGAARELRDQAGLAPADVAHQRNHWDLLTLLEGAGPPEARHKATPGREAGPFPRARTVSVSVPPHGGGALPRCRTLSAGAGPRGGGACLQARTWSVDLAARGGGAYSHCRSLSGVGAGGGPTPRGRRFSAGMRGPRPNPAIMRGRYGVAAGRGGRVSTDDWPCDWVALGACGSASNIPIPPPCLTPSPERGSPQLDCGPPALQEMPINQGGEGKK

SEQ ID NO: 134 - protein, 778 aa, Artificial Sequence
  derived and/or modified protein sequence (wt) from Homo sapiens__ENST00000231509.7__NR3C1
MDSKESLTPGREENPSSVLAQERGDVMDFYKTLRGGATVKVSASSPSLAVASQSDSKQRRLLVDFPKGSVSNAQQPDLSKAVSLSMGLYMGETETKVMGNDLGFPQQGQISLSSGETDLKLLEESIANLNRSTSVPENPKSSASTAVSAAPTEKEFPKTHSDVSSEQQHLKGQTGTNGGNVKLYTTDQSTFDILQDLEFSSGSPGKETNESPWRSDLLIDENCLLSPLAGEDDSFLLEGNSNEDCKPLILPDTKPKIKDNGDLVLSSPSNVTLPQVKTEKEDFIELCTPGVIKQEKLGTVYCQASFPGANIIGNKMSAISVHGVSTSGGQMYHYDMNTASLSQQQDQKPIFNVIPPIPVGSENWNRCQGSGDDNLTSLGTLNFPGRTVFSNGYSSPSMRPDVSSPPSSSSTATTGPPPKLCLVCSDEASGCHYGVLTCGSCKVFFKRAVEGRQHNYLCAGRNDCIIDKIRRKNCPACRYRKCLQAGMNLEARKTKKKIKGIQQATTGVSQETSENPGNKTIVPATLPQLTPTLVSLLEVIEPEVLYAGYDSSVPDSTWRIMTTLNMLGGRQVIAAVKWAKAIPGFRNLHLDDQMTLLQYSWMFLMAFALGWRSYRQSSANLLCFAPDLIINEQRMTLPCMYDQCKHMLYVSSELHRLQVSYEEYLCMKTLLLLSSVPKDGLKSQELFDEIRMTYIKELGKAIVKREGNSSQNWQRFYQLTKLLDSMHEVVENLLNYCFQTFLDKTMSIEFPEMLAEIITNQIPKYSNGNIKKLLFHQK

SEQ ID NO: 135 - protein, 777 aa, Artificial Sequence
  derived and/or modified protein sequence (wt) from Homo sapiens__ENST00000343796.6__NR3C1
MDSKESLTPGREENPSSVLAQERGDVMDFYKTLRGGATVKVSASSPSLAVASQSDSKQRRLLVDFPKGSVSNAQQPDLSKAVSLSMGLYMGETETKVMGNDLGFPQQGQISLSSGETDLKLLEESIANLNRSTSVPENPKSSASTAVSAAPTEKEFPKTHSDVSSEQQHLKGQTGTNGGNVKLYTTDQSTFDILQDLEFSSGSPGKETNESPWRSDLLIDENCLLSPLAGEDDSFLLEGNSNEDCKPLILPDTKPKIKDNGDLVLSSPSNVTLPQVKTEKEDFIELCTPGVIKQEKLGTVYCQASFPGANIIGNKMSAISVHGVSTSGGQMYHYDMNTASLSQQQDQKPIFNVIPPIPVGSENWNRCQGSGDDNLTSLGTLNFPGRTVFSNGYSSPSMRPDVSSPPSSSSTATTGPPPKLCLVCSDEASGCHYGVLTCGSCKVFFKRAVEGQHNYLCAGRNDCIIDKIRRKNCPACRYRKCLQAGMNLEARKTKKKIKGIQQATTGVSQETSENPGNKTIVPATLPQLTPTLVSLLEVIEPEVLYAGYDSSVPDSTWRIMTTLNMLGGRQVIAAVKWAKAIPGFRNLHLDDQMTLLQYSWMFLMAFALGWRSYRQSSANLLCFAPDLIINEQRMTLPCMYDQCKHMLYVSSELHRLQVSYEEYLCMKTLLLLSSVPKDGLKSQELFDEIRMTYIKELGKAIVKREGNSSQNWQRFYQLTKLLDSMHEVVENLLNYCFQTFLDKTMSIEFPEMLAEIITNQIPKYSNGNIKKLLFHQK

SEQ ID NO: 136 - protein, 751 aa, Artificial Sequence
  derived and/or modified protein sequence (wt) from Homo sapiens__ENST00000424646.6__NR3C1
MDSKESLTPGREENPSSVLAQERGDVMDFYKTLRGGATVKVSASSPSLAVASQSDSKQRRLLVDFPKGSVSNAQQPDLSKAVSLSMGLYMGETETKVMGNDLGFPQQGQISLSSGETDLKLLEESIANLNRSTSVPENPKSSASTAVSAAPTEKEFPKTHSDVSSEQQHLKGQTGTNGGNVKLYTTDQSTFDILQDLEFSSGSPGKETNESPWRSDLLIDENCLLSPLAGEDDSFLLEGNSNEDCKPLILPDTKPKIKDNGDLVLSSPSNVTLPQVKTEKEDFIELCTPGVIKQEKLGTVYCQASFPGANIIASLSQQQDQKPIFNVIPPIPVGSENWNRCQGSGDDNLTSLGTLNFPGRTVFSNGYSSPSMRPDVSSPPSSSSTATTGPPPKLCLVCSDEASGCHYGVLTCGSCKVFFKRAVEGQHNYLCAGRNDCIIDKIRRKNCPACRYRKCLQAGMNLEARKTKKKIKGIQQATTGVSQETSENPGNKTIVPATLPQLTPTLVSLLEVIEPEVLYAGYDSSVPDSTWRIMTTLNMLGGRQVIAAVKWAKAIPGFRNLHLDDQMTLLQYSWMFLMAFALGWRSYRQSSANLLCFAPDLIINEQRMTLPCMYDQCKHMLYVSSELHRLQVSYEEYLCMKTLLLLSSVPKDGLKSQELFDEIRMTYIKELGKAIVKREGNSSQNWQRFYQLTKLLDSMHEVVENLLNYCFQTFLDKTMSIEFPEMLAEIITNQIPKYSNGNIKKLLFHQK

SEQ ID NO: 137 - protein, 742 aa, Artificial Sequence
  derived and/or modified protein sequence (wt) from Homo sapiens__ENST00000415690.6__NR3C1
MDSKESLTPGREENPSSVLAQERGDVMDFYKTLRGGATVKVSASSPSLAVASQSDSKQRRLLVDFPKGSVSNAQQPDLSKAVSLSMGLYMGETETKVMGNDLGFPQQGQISLSSGETDLKLLEESIANLNRSTSVPENPKSSASTAVSAAPTEKEFPKTHSDVSSEQQHLKGQTGTNGGNVKLYTTDQSTFDILQDLEFSSGSPGKETNESPWRSDLLIDENCLLSPLAGEDDSFLLEGNSNEDCKPLILPDTKPKIKDNGDLVLSSPSNVTLPQVKTEKEDFIELCTPGVIKQEKLGTVYCQASFPGANIIGNKMSAISVHGVSTSGGQMYHYDMNTASLSQQQDQKPIFNVIPPIPVGSENWNRCQGSGDDNLTSLGTLNFPGRTVFSNGYSSPSMRPDVSSPPSSSSTATTGPPPKLCLVCSDEASGCHYGVLTCGSCKVFFKRAVEGQHNYLCAGRNDCIIDKIRRKNCPACRYRKCLQAGMNLEARKTKKKIKGIQQATTGVSQETSENPGNKTIVPATLPQLTPTLVSLLEVIEPEVLYAGYDSSVPDSTWRIMTTLNMLGGRQVIAAVKWAKAIPGFRNLHLDDQMTLLQYSWMFLMAFALGWRSYRQSSANLLCFAPDLIINEQRMTLPCMYDQCKHMLYVSSELHRLQVSYEEYLCMKTLLLLSSVPKDGLKSQELFDEIRMTYIKELGKAIVKREGNSSQNWQRFYQLTKLLDSMHENVMWLKPESTSHTLI

SEQ ID NO: 138 - protein, 212 aa, Artificial Sequence
  derived and/or modified protein sequence (wt) from Homo sapiens__ENST00000301944.2__NXNL1
MASLFSGRILIRNNSDQDELDTEAEVSRRLENRLVLLFFGAGACPQCQAFVPILKDFFVRLTDEFYVLRAAQLALVYVSQDSTEEQQDLFLKDMPKKWLFLPFEDDLRRDLGRQFSVERLPAVVVLKPDGDVLTRDGADEIQRLGTACFANWQEAAEVLDRNFQLPEDLEDQEPRSLTECLRRHKYRVEKAARGGRDPGGGGGEEGGAGGLF

SEQ ID NO: 139 - protein, 1015 aa, Artificial Sequence
  derived and/or modified protein sequence (wt) from Homo sapiens__ENST00000361510.7__OPA1
MWRLRRAAVACEVCQSLVKHSSGIKGSLPLQKLHLVSRSIYHSHHPTLKLQRPQLRTSFQQFSSLTNLPLRKLKFSPIKYGYQPRRNFWPARLATRLLKLRYLILGSAVGGGYTAKKTFDQWKDMIPDLSEYKWIVPDIVWEIDEYIDFEKIRKALPSSEDLVKLAPDFDKIVESLSLLKDFFTSGHKLVSEVIGASDLLLLLGSPEETAFRATDRGSESDKHFRKGLLGELILLQQQIQEHEEEARRAAGQYSTSYAQQKRKVSDKEKIDQLQEELLHTQLKYQRILERLEKENKELRKLVLQKDDKGIHHRKLKKSLIDMYSEVLDVLSDYDASYNTQDHLPRVVVVGDQSAGKTSVLEMIAQARIFPRGSGEMMTRSPVKVTLSEGPHHVALFKDSSREFDLTKEEDLAALRHEIELRMRKNVKEGCTVSPETISLNVKGPGLQRMVLVDLPGVINTVTSGMAPDTKETIFSISKAYMQNPNAIILCIQDGSVDAERSIVTDLVSQMDPHGRRTIFVLTKVDLAEKNVASPSRIQQIIEGKLFPMKALGYFAVVTGKGNSSESIEAIREYEEEFFQNSKLLKTSMLKAHQVTTRNLSLAVSDCFWKMVRESVEQQADSFKATRFNLETEWKNNYPRLRELDRNELFEKAKNEILDEVISLSQVTPKHWEEILQQSLWERVSTHVIENIYLPAAQTMNSGTFNTTVDIKLKQWTDKQLPNKAVEVAWETLQEEFSRFMTEPKGKEHDDIFDKLKEAVKEESIKRHKWNDFAEDSLRVIQHNALEDRSISDKQQWDAAIYFMEEALQARLKDTENAIENMVGPDWKKRWLYWKNRTQEQCVHNETKNELEKMLKCNEEHPAYLASDEITTVRKNLESRGVEVDPSLIKDTWHQVYRRHFLKTALNHCNLCRRGFYYYQRHFVDSELECNDVVLFWRIQRMLAITANTLRQQLTNTEVRRLEKNVKEVLEDFAEDGEKKIKLLTGKRVQLAEDLKKVREIQEKLDAFIEALHQEK

SEQ ID NO: 140 - protein, 997 aa, Artificial Sequence
  derived and/or modified protein sequence (wt) from Homo sapiens__ENST00000361908.8__OPA1
MWRLRRAAVACEVCQSLVKHSSGIKGSLPLQKLHLVSRSIYHSHHPTLKLQRPQLRTSFQQFSSLTNLPLRKLKFSPIKYGYQPRRNFWPARLATRLLKLRYLILGSAVGGGYTAKKTFDQWKDMIPDLSEYKWIVPDIVWEIDEYIDFEKIRKALPSSEDLVKLAPDFDKIVESLSLLKDFFTSGSPEETAFRATDRGSESDKHFRKGLLGELILLQQQIQEHEEEARRAAGQYSTSYAQQKRKVSDKEKIDQLQEELLHTQLKYQRILERLEKENKELRKLVLQKDDKGIHHRKLKKSLIDMYSEVLDVLSDYDASYNTQDHLPRVVVVGDQSAGKTSVLEMIAQARIFPRGSGEMMTRSPVKVTLSEGPHHVALFKDSSREFDLTKEEDLAALRHEIELRMRKNVKEGCTVSPETISLNVKGPGLQRMVLVDLPGVINTVTSGMAPDTKETIFSISKAYMQNPNAIILCIQDGSVDAERSIVTDLVSQMDPHGRRTIFVLTKVDLAEKNVASPSRIQQIIEGKLFPMKALGYFAVVTGKGNSSESIEAIREYEEEFFQNSKLLKTSMLKAHQVTTRNLSLAVSDCFWKMVRESVEQQADSFKATRFNLETEWKNNYPRLRELDRNELFEKAKNEILDEVISLSQVTPKHWEEILQQSLWERVSTHVIENIYLPAAQTMNSGTFNTTVDIKLKQWTDKQLPNKAVEVAWETLQEEFSRFMTEPKGKEHDDIFDKLKEAVKEESIKRHKWNDFAEDSLRVIQHNALEDRSISDKQQWDAAIYFMEEALQARLKDTENAIENMVGPDWKKRWLYWKNRTQEQCVHNETKNELEKMLKCNEEHPAYLASDEITTVRKNLESRGVEVDPSLIKDTWHQVYRRHFLKTALNHCNLCRRGFYYYQRHFVDSELECNDVVLFWRIQRMLAITANTLRQQLTNTEVRRLEKNVKEVLEDFAEDGEKKIKLLTGKRVQLAEDLKKVREIQEKLDAFIEALHQEK

SEQ ID NO: 141 - protein, 979 aa, Artificial Sequence
  derived and/or modified protein sequence (wt) from Homo sapiens__ENST00000361715.6__OPA1
MWRLRRAAVACEVCQSLVKHSSGIKGSLPLQKLHLVSRSIYHSHHPTLKLQRPQLRTSFQQFSSLTNLPLRKLKFSPIKYGYQPRRNFWPARLATRLLKLRYLILGSAVGGGYTAKKTFDQWKDMIPDLSEYKWIVPDIVWEIDEYIDFGHKLVSEVIGASDLLLLLGSPEETAFRATDRGSESDKHFRKGLLGELILLQQQIQEHEEEARRAAGQYSTSYAQQKRKVSDKEKIDQLQEELLHTQLKYQRILERLEKENKELRKLVLQKDDKGIHHRKLKKSLIDMYSEVLDVLSDYDASYNTQDHLPRVVVVGDQSAGKTSVLEMIAQARIFPRGSGEMMTRSPVKVTLSEGPHHVALFKDSSREFDLTKEEDLAALRHEIELRMRKNVKEGCTVSPETISLNVKGPGLQRMVLVDLPGVINTVTSGMAPDTKETIFSISKAYMQNPNAIILCIQDGSVDAERSIVTDLVSQMDPHGRRTIFVLTKVDLAEKNVASPSRIQQIIEGKLFPMKALGYFAVVTGKGNSSESIEAIREYEEEFFQNSKLLKTSMLKAHQVTTRNLSLAVSDCFWKMVRESVEQQADSFKATRFNLETEWKNNYPRLRELDRNELFEKAKNEILDEVISLSQVTPKHWEEILQQSLWERVSTHVIENIYLPAAQTMNSGTFNTTVDIKLKQWTDKQLPNKAVEVAWETLQEEFSRFMTEPKGKEHDDIFDKLKEAVKEESIKRHKWNDFAEDSLRVIQHNALEDRSISDKQQWDAAIYFMEEALQARLKDTENAIENMVGPDWKKRWLYWKNRTQEQCVHNETKNELEKMLKCNEEHPAYLASDEITTVRKNLESRGVEVDPSLIKDTWHQVYRRHFLKTALNHCNLCRRGFYYYQRHFVDSELECNDVVLFWRIQRMLAITANTLRQQLTNTEVRRLEKNVKEVLEDFAEDGEKKIKLLTGKRVQLAEDLKKVREIQEKLDAFIEALHQEK

SEQ ID NO: 142 - protein, 978 aa, Artificial Sequence
  derived and/or modified protein sequence (wt) from Homo sapiens__ENST00000392437.6__OPA1
MWRLRRAAVACEVCQSLVKHSSGIKGSLPLQKLHLVSRSIYHSHHPTLKLQRPQLRTSFQQFSSLTNLPLRKLKFSPIKYGYQPRRNFWPARLATRLLKLRYLILGSAVGGGYTAKKTFDQWKDMIPDLSEYKWIVPDIVWEIDEYIDFEKIRKALPSSEDLVKLAPDFDKIVESLSLLKDFFTSGHKLVSEVIGASDLLLLLGSPEETAFRATDRGSESDKHFRKVSDKEKIDQLQEELLHTQLKYQRILERLEKENKELRKLVLQKDDKGIHHRKLKKSLIDMYSEVLDVLSDYDASYNTQDHLPRVVVVGDQSAGKTSVLEMIAQARIFPRGSGEMMTRSPVKVTLSEGPHHVALFKDSSREFDLTKEEDLAALRHEIELRMRKNVKEGCTVSPETISLNVKGPGLQRMVLVDLPGVINTVTSGMAPDTKETIFSISKAYMQNPNAIILCIQDGSVDAERSIVTDLVSQMDPHGRRTIFVLTKVDLAEKNVASPSRIQQIIEGKLFPMKALGYFAVVTGKGNSSESIEAIREYEEEFFQNSKLLKTSMLKAHQVTTRNLSLAVSDCFWKMVRESVEQQADSFKATRFNLETEWKNNYPRLRELDRNELFEKAKNEILDEVISLSQVTPKHWEEILQQSLWERVSTHVIENIYLPAAQTMNSGTFNTTVDIKLKQWTDKQLPNKAVEVAWETLQEEFSRFMTEPKGKEHDDIFDKLKEAVKEESIKRHKWNDFAEDSLRVIQHNALEDRSISDKQQWDAAIYFMEEALQARLKDTENAIENMVGPDWKKRWLYWKNRTQEQCVHNETKNELEKMLKCNEEHPAYLASDEITTVRKNLESRGVEVDPSLIKDTWHQVYRRHFLKTALNHCNLCRRGFYYYQRHFVDSELECNDVVLFWRIQRMLAITANTLRQQLTNTEVRRLEKNVKEVLEDFAEDGEKKIKLLTGKRVQLAEDLKKVREIQEKLDAFIEALHQEK

SEQ ID NO: 143 - protein, 972 aa, Artificial Sequence
  derived and/or modified protein sequence (wt) from Homo sapiens__ENST00000642445.1__OPA1
MWRLRRAAVACEVCQSLVKHSSGIKGSLPLQKLHLVSRSIYHSHHPTLKLQRPQLRTSFQQFSSLTNLPLRKLKFSPIKYGYQPRRNFWPARLATRLLKLRYLILGSAVGGGYTAKKTFDQWKDMIPDLSEYKWIVPDIVWEIDEYIDFEKIRKALPSSEDLVKLAPDFDKIVESLSLLKDFFTSGSPEETAFRATDRGSESDKHFRKVSDKEKIDQLQEELLHTQLKYQRILERLEKENKELRKLVLQKDDKGIHHRKLKKSLIDMYSEVLDVLSDYDASYNTQDHLPRVVVVGDQSAGKTSVLEMIAQARIFPRGSGEMMTRSPVKVTLSEGPHHVALFKDSSREFDLTKEEDLAALRHEIELRMRKNVKEGCTVSPETISLNVKGPGLQRMVLVDLPGVINTVTSGMAPDTKETIFSISKAYMQNPNAIILCIQDGSVDAERSIVTDLVSQMDPHGRRTIFVLTKVDLAEKNVASPSRIQQIIEGKLFPMKALGYFAVVTGKGNSSESIEAIREYEEEFFQNSKLLKTSMLKAHQVTTRNLSLAVSDCFWKMVRESVEQQADSFKATRFNLETEWKNNYPRLRELDRNELFEKAKNEILDEVISLSQVTPKHWEEILQQSLWERVSTHVIENIYLPAAQTMNSGTFNTTVDIKLKQWTDKQLPNKAVEVAWETLQEEFSRFMTEPKGKEHDDIFDKLKEAVKEESIKRHKWNDFAEDSLRVIQHNALEDRSISDKQQWDAAIYFMEEALQARLKDTENAIENMVGPDWKKRWLYWKNRTQEQCVHNETKNELEKMLKCNEEHPAYLASDEITTVRKNLESRGVEVDPSLIKDTWHQVYRRHFLKTALNHCNLCRRGFYYYQRHFVDSELECNDVVLFWRIQRMLAITANTLRQQLTNTEVRRLEKNVKEVLEDFAEDGEKKIKLLTGKRVQLAEDLKMFFFPSSDSTLHTRPPHGAAPSIDTSFTLSGL

SEQ ID NO: 144 - protein, 965 aa, Artificial Sequence
  derived and/or modified protein sequence (wt) from Homo sapiens__ENST00000645553.1__OPA1
MWRLRRAAVACEVCQSLVKHSSGIKGSLPLQKLHLVSRSIYHSHHPTLKLQRPQLRTSFQQFSSLTNLPLRKLKFSPIKYGYQPRRNFWPARLATRLLKLRYLILGSAVGGGYTAKKTFDQWKDMIPDLSEYKWIVPDIVWEIDEYIDFEKIRKALPSSEDLVKLAPDFDKIVESLSLLKDFFTSGSPEETAFRATDRGSESDKHFRKVSDKEKIDQLQEELLHTQSKIWKLKYQRILERLEKENKELRKLVLQKDDKGIHHRKLKKSLIDMYSEVLDVLSDYDASYNTQDHLPRVVVVGDQSAGKTSVLEMIAQARIFPRGSGEMMTRSPVKVTLSEGPHHVALFKDSSREFDLTKEEDLAALRHEIELRMRKNVKEGCTVSPETISLNVKGPGLQRMVLVDLPGVINTVTSGMAPDTKETIFSISKAYMQNPNAIILCIQDGSVDAERSIVTDLVSQMDPHGRRTIFVLTKVDLAEKNVASPSRIQQIIEGKLFPMKALGYFAVVTGKGNSSESIEAIREYEEEFFQNSKLLKTSMLKAHQVTTRNLSLAVSDCFWKMVRESVEQQADSFKATRFNLETEWKNNYPRLRELDRNELFEKAKNEILDEVISLSQVTPKHWEEILQQSLWERVSTHVIENIYLPAAQTMNSGTFNTTVDIKLKQWTDKQLPNKAVEVAWETLQEEFSRFMTEPKGKEHDDIFDKLKEAVKEESIKRHKWNDFAEDSLRVIQHNALEDRSISDKQQWDAAIYFMEEALQARLKDTENAIENMVGPDWKKRWLYWKNRTQEQCVHNETKNELEKMLKCNEEHPAYLASDEITTVRKNLESRGVEVDPSLIKDTWHQVYRRHFLKTALNHCNLCRRGFYYYQRHFVDSELECNDVVLFWRIQRMLAITANTLRQQLTNTEVRRLEKNVKEVLEDFAEDGEKKIKLLTGKRVQLAEDLKKVREIQEKLDAFIEALHQEK

SEQ ID NO: 145 - protein, 963 aa, Artificial Sequence
  derived and/or modified protein sequence (wt) from Homo sapiens__ENST00000644595.1__OPA1
MWRLRRAAVACEVCQSLVKHSSGIKGSLPLQKLHLVSRSIYHSHHPTLKLQRPQLRTSFQQFSSLTNLPLRKLKFSPIKYGYQPRRNFWPARLATRLLKLRYLILGSAVGGGYTAKKTFDQWKDMIPDLSEYKWIVPDIVWEIDEYIDFEKIRKALPSSEDLVKLAPDFDKIVESLSLLKDFFTSGSPEETAFRATDRGSESDKHFRKVSDKEKIDQLQEELLHTQLKYQRILERLEKENKELRKLVLQKDDKGIHHRKLKKSLIDMYSEVLDVLSDYDASYNTQDHLPRVVVVGDQSAGKTSVLEMIAQARIFPRGSGEMMTRSPVKVTLSEGPHHVALFKDSSREFDLTKEEDLAALRHEIELRMRKNVKEGCTVSPETISLNVKGPGLQRMVLVDLPGVINTVTSGMAPDTKETIFSISKAYMQNPNAIILCIQDGSVDAERSIVTDLVSQMDPHGRRTIFVLTKVDLAEKNVASPSRIQQIIEGKLFPMKALGYFAVVTGKGNSSESIEAIREYEEEFFQNSKLLKTSMLKAHQVTTRNLSLAVSDCFWKMVRESVEQQADSFKATRFNLETEWKNNYPRLRELDRNELFEKAKNEILDEVISLSQVTPKHWEEILQQSLWERVSTHVIENIYLPAAQTMNSGTFNTTVDIKLKQWTDKQLPNKAVEVAWETLQEEFSRFMTEPKGKEHDDIFDKLKEAVKEESIKRHKWNDFAEDSLRVIQHNALEDRSISDKQQWDAAIYFMEEALQARLKDTENAIENMVGPDWKKRWLYWKNRTQEQCVHNETKNELEKMLKCNEEHPAYLASDEITTVRKNLESRGVEVDPSLIKDTWHQVYRRHFLKTALNHCNLCRRGFYYYQRHFVDSELECNDVVLFWRIQRMLAITANTLRQQLTNTEVRRLEKNVKEVLEDFAEDGEKKIKLLTGKRVQLAEDLTMIPARLYENQMKRQIWKYIVDTS

SEQ ID NO: 146 - protein, 961 aa, Artificial Sequence
  derived and/or modified protein sequence (wt) from Homo sapiens__ENST00000361150.6__OPA1
MWRLRRAAVACEVCQSLVKHSSGIKGSLPLQKLHLVSRSIYHSHHPTLKLQRPQLRTSFQQFSSLTNLPLRKLKFSPIKYGYQPRRNFWPARLATRLLKLRYLILGSAVGGGYTAKKTFDQWKDMIPDLSEYKWIVPDIVWEIDEYIDFGSPEETAFRATDRGSESDKHFRKGLLGELILLQQQIQEHEEEARRAAGQYSTSYAQQKRKVSDKEKIDQLQEELLHTQLKYQRILERLEKENKELRKLVLQKDDKGIHHRKLKKSLIDMYSEVLDVLSDYDASYNTQDHLPRVVVVGDQSAGKTSVLEMIAQARIFPRGSGEMMTRSPVKVTLSEGPHHVALFKDSSREFDLTKEEDLAALRHEIELRMRKNVKEGCTVSPETISLNVKGPGLQRMVLVDLPGVINTVTSGMAPDTKETIFSISKAYMQNPNAIILCIQDGSVDAERSIVTDLVSQMDPHGRRTIFVLTKVDLAEKNVASPSRIQQIIEGKLFPMKALGYFAVVTGKGNSSESIEAIREYEEEFFQNSKLLKTSMLKAHQVTTRNLSLAVSDCFWKMVRESVEQQADSFKATRFNLETEWKNNYPRLRELDRNELFEKAKNEILDEVISLSQVTPKHWEEILQQSLWERVSTHVIENIYLPAAQTMNSGTFNTTVDIKLKQWTDKQLPNKAVEVAWETLQEEFSRFMTEPKGKEHDDIFDKLKEAVKEESIKRHKWNDFAEDSLRVIQHNALEDRSISDKQQWDAAIYFMEEALQARLKDTENAIENMVGPDWKKRWLYWKNRTQEQCVHNETKNELEKMLKCNEEHPAYLASDEITTVRKNLESRGVEVDPSLIKDTWHQVYRRHFLKTALNHCNLCRRGFYYYQRHFVDSELECNDVVLFWRIQRMLAITANTLRQQLTNTEVRRLEKNVKEVLEDFAEDGEKKIKLLTGKRVQLAEDLKKVREIQEKLDAFIEALHQEK

SEQ ID NO: 147 - protein, 960 aa, Artificial Sequence
  derived and/or modified protein sequence (wt) from Homo sapiens__ENST00000392438.7__OPA1
MWRLRRAAVACEVCQSLVKHSSGIKGSLPLQKLHLVSRSIYHSHHPTLKLQRPQLRTSFQQFSSLTNLPLRKLKFSPIKYGYQPRRNFWPARLATRLLKLRYLILGSAVGGGYTAKKTFDQWKDMIPDLSEYKWIVPDIVWEIDEYIDFEKIRKALPSSEDLVKLAPDFDKIVESLSLLKDFFTSGSPEETAFRATDRGSESDKHFRKVSDKEKIDQLQEELLHTQLKYQRILERLEKENKELRKLVLQKDDKGIHHRKLKKSLIDMYSEVLDVLSDYDASYNTQDHLPRVVVVGDQSAGKTSVLEMIAQARIFPRGSGEMMTRSPVKVTLSEGPHHVALFKDSSREFDLTKEEDLAALRHEIELRMRKNVKEGCTVSPETISLNVKGPGLQRMVLVDLPGVINTVTSGMAPDTKETIFSISKAYMQNPNAIILCIQDGSVDAERSIVTDLVSQMDPHGRRTIFVLTKVDLAEKNVASPSRIQQIIEGKLFPMKALGYFAVVTGKGNSSESIEAIREYEEEFFQNSKLLKTSMLKAHQVTTRNLSLAVSDCFWKMVRESVEQQADSFKATRFNLETEWKNNYPRLRELDRNELFEKAKNEILDEVISLSQVTPKHWEEILQQSLWERVSTHVIENIYLPAAQTMNSGTFNTTVDIKLKQWTDKQLPNKAVEVAWETLQEEFSRFMTEPKGKEHDDIFDKLKEAVKEESIKRHKWNDFAEDSLRVIQHNALEDRSISDKQQWDAAIYFMEEALQARLKDTENAIENMVGPDWKKRWLYWKNRTQEQCVHNETKNELEKMLKCNEEHPAYLASDEITTVRKNLESRGVEVDPSLIKDTWHQVYRRHFLKTALNHCNLCRRGFYYYQRHFVDSELECNDVVLFWRIQRMLAITANTLRQQLTNTEVRRLEKNVKEVLEDFAEDGEKKIKLLTGKRVQLAEDLKKVREIQEKLDAFIEALHQEK

SEQ ID NO: 148 - protein, 924 aa, Artificial Sequence
  derived and/or modified protein sequence (wt) from Homo sapiens__ENST00000646793.1__OPA1
MWRLRRAAVACEVCQSLVKHSSGIKGSLPLQKLHLVSRSIYHSHHPTLKLQRPQLRTSFQQFSSLTNLPLRKLKFSPIKYGYQPRRNFWPARLATRLLKLRYLILGSAVGGGYTAKKTFDQWKDMIPDLSEYKWIVPDIVWEIDEYIDFGSPEETAFRATDRGSESDKHFRKVSDKEKIDQLQEELLHTQLKYQRILERLEKENKELRKLVLQKDDKGIHHRKLKKSLIDMYSEVLDVLSDYDASYNTQDHLPRVVVVGDQSAGKTSVLEMIAQARIFPRGSGEMMTRSPVKVTLSEGPHHVALFKDSSREFDLTKEEDLAALRHEIELRMRKNVKEGCTVSPETISLNVKGPGLQRMVLVDLPGVINTVTSGMAPDTKETIFSISKAYMQNPNAIILCIQDGSVDAERSIVTDLVSQMDPHGRRTIFVLTKVDLAEKNVASPSRIQQIIEGKLFPMKALGYFAVVTGKGNSSESIEAIREYEEEFFQNSKLLKTSMLKAHQVTTRNLSLAVSDCFWKMVRESVEQQADSFKATRFNLETEWKNNYPRLRELDRNELFEKAKNEILDEVISLSQVTPKHWEEILQQSLWERVSTHVIENIYLPAAQTMNSGTFNTTVDIKLKQWTDKQLPNKAVEVAWETLQEEFSRFMTEPKGKEHDDIFDKLKEAVKEESIKRHKWNDFAEDSLRVIQHNALEDRSISDKQQWDAAIYFMEEALQARLKDTENAIENMVGPDWKKRWLYWKNRTQEQCVHNETKNELEKMLKCNEEHPAYLASDEITTVRKNLESRGVEVDPSLIKDTWHQVYRRHFLKTALNHCNLCRRGFYYYQRHFVDSELECNDVVLFWRIQRMLAITANTLRQQLTNTEVRRLEKNVKEVLEDFAEDGEKKIKLLTGKRVQLAEDLKKVREIQEKLDAFIEALHQEK

SEQ ID NO: 149 - protein, 854 aa, Artificial Sequence
  derived and/or modified protein sequence (wt) from Homo sapiens__ENST00000643329.1__OPA1
MIPDLSEYKWIVPDIVWEIDEYIDFEKIRKALPSSEDLVKLAPDFDKIVESLSLLKDFFTSGHKLVSEVIGASDLLLLLGSPEETAFRATDRGSESDKHFRKVSDKEKIDQLQEELLHTQLKYQRILERLEKENKELRKLVLQKDDKGIHHRKLKKSLIDMYSEVLDVLSDYDASYNTQDHLPRVVVVGDQSAGKTSVLEMIAQARIFPRGSGEMMTRSPVKVTLSEGPHHVALFKDSSREFDLTKEEDLAALRHEIELRMRKNVKEGCTVSPETISLNVKGPGLQRMVLVDLPGVINTVTSGMAPDTKETIFSISKAYMQNPNAIILCIQDGSVDAERSIVTDLVSQMDPHGRRTIFVLTKVDLAEKNVASPSRIQQIIEGKLFPMKALGYFAVVTGKGNSSESIEAIREYEEEFFQNSKLLKTSMLKAHQVTTRNLSLAVSDCFWKMVRESVEQQADSFKATRFNLETEWKNNYPRLRELDRNELFEKAKNEILDEVISLSQVTPKHWEEILQQSLWERVSTHVIENIYLPAAQTMNSGTFNTTVDIKLKQWTDKQLPNKAVEVAWETLQEEFSRFMTEPKGKEHDDIFDKLKEAVKEESIKRHKWNDFAEDSLRVIQHNALEDRSISDKQQWDAAIYFMEEALQARLKDTENAIENMVGPDWKKRWLYWKNRTQEQCVHNETKNELEKMLKCNEEHPAYLASDEITTVRKNLESRGVEVDPSLIKDTWHQVYRRHFLKTALNHCNLCRRGFYYYQRHFVDSELECNDVVLFWRIQRMLAITANTLRQQLTNTEVRRLEKNVKEVLEDFAEDGEKKIKLLTGKRVQLAEDLKKVREIQEKLDAFIEALHQEK

SEQ ID NO: 150 - protein, 569 aa, Artificial Sequence
  derived and/or modified protein sequence (wt) from Homo sapiens__ENST00000642593.1__OPA1
MWRLRRAAVACEVCQSLVKHSSGIKGSLPLQKLHLVSRSIYHSHHPTLKLQRPQLRTSFQQFSSLTNLPLRKLKFSPIKYGYQPRRNFWPARLATRLLKLRYLILGSAVGGGYTAKKTFDQWKDMIPDLSEYKWIVPDIVWEIDEYIDFEKIRKALPSSEDLVKLAPDFDKIVESLSLLKDFFTSGSPEETAFRATDRGSESDKHFRKVSDKEKIDQLQEELLHTQLKYQRILERLEKENKELRKLVLQKDDKGIHHRKLKKSLIDMYSEVLDVLSDYDASYNTQDHLPRVVVVGDQSAGKTSVLEMIAQARIFPRGSGEMMTRSPVKVTLSEGPHHVALFKDSSREFDLTKEEDLAALRHEIELRMRKNVKEGCTVSPETISLNVKGPGLQRMVLVDLPGVINTVTSGMAPDTKETIFSISKAYMQNPNAIILCIQDGSVDAERSIVTDLVSQMDPHGRRTIFVLTKVDLAEKNVASPSRIQQIIEGKLFPMKALGYFAVVTGKGNSSESIEAIREYEEEFFQNSKLLKTSMLKAHQVTTRNLSLAVSDCFWKMVRESVEQQADSFKE

SEQ ID NO: 151 - protein, 528 aa, Artificial Sequence
  derived and/or modified protein sequence (wt) from Homo sapiens__ENST00000646277.1__OPA1
MWRLRRAAVACEVCQSLVKHSSGIKGSLPLQKLHLVSRSIYHSHHPTLKLQRPQLRTSFQQFSSLTNLPLRKLKFSPIKYGYQPRRNFWPARLATRLLKLRYLILGSAVGGGYTAKKTFDQWKDMIPDLSEYKWIVPDIVWEIDEYIDFEKIRKALPSSEDLVKLAPDFDKIVESLSLLKDFFTSGHKLVSEVIGASDLLLLLGSPEETAFRATDRGSESDKHFRKGLLGELILLQQQIQEHEEEARRAAGQYSTSYAQQKRKVSDKEKIDQLQEELLHTQLKYQRILERLEKENKELRKLVLQKDDKGIHHRKLKKSLIDMYSEVLDVLSDYDASYNTQDHLPRVVVVGDQSAGKTSVLEMIAQARIFPRGSGEMMTRSPVKVTLSEGPHHVALFKDSSREFDLTKEEDLAALRHEIELRMRKNVKEGCTVSPETISLNVKGPGLQRMVLVDLPGVINTVTSGMAPDTKETIFSISKAYMQNPNAIILCIQVSFFYFFQMDLWMLNAVLLQTWSVKWTLMEGEPYSF

SEQ ID NO: 152 - protein, 412 aa, Artificial Sequence
  derived and/or modified protein sequence (wt) from Homo sapiens__ENST00000644841.1__OPA1
MIPDLSEYKWIVPDIVWEIDEYIDFEKIRKALPSSEDLVKLAPDFDKIVESLSLLKDFFTSGSPEETAFRATDRGSESDKHFRKVSDKEKIDQLQEELLHTQLKYQRILERLEKENKELRKLVLQKDDKGIHHRKLKKSLIDMYSEVLDVLSDYDASYNTQDHLPRVVVVGDQSAGKTSVLEMIAQARIFPRGSGEMMTRSPVKVTLSEGPHHVALFKDSSREFDLTKEEDLAALRHEIELRMRKNVKEGCTVSPETISLNVKGPGLQRMVLVDLPGVINTVTSGMAPDTKETIFSISKAYMQNPNAIILCIQDGSVDAERSIVTDLVSQMDPHGRRTIFVLTKVDLAEKNVASPSRIQQIIEGKLFPMKALGYFAVVTGKGNSSESIEAIREYEEEFFQNSKLLKHGGSHL

SEQ ID NO: 153 - protein, 209 aa, Artificial Sequence
  derived and/or modified protein sequence (wt) from Homo sapiens__ENST00000646085.1__OPA1
MWRLRRAAVACEVCQSLVKHSSGIKGSLPLQKLHLVSRSIYHSHHPTLKLQRPQLRTSFQQFSSLTNLPLRKLKFSPIKYGYQPRRNFWPARLATRLLKLRYLILGSAVGGGYTAKKTFDQWKDMIPDLSEYKWIVPDIVWEIDEYIDFEKIRKALPSSEDLVKLAPDFDKIVESLSLLKDFFTSGSPEETAFRATDRGSESDKHFRKL

SEQ ID NO: 154 - protein, 85 aa, Artificial Sequence
  derived and/or modified protein sequence (wt) from Homo sapiens__ENST00000434811.2__OPA1
MDLSEYKWIVPDIVWEIDEYIDFEKIRKALPSSEDLVKLAPDFDKIVESLSLLKDFFTSGHKLVSEVIGASDLLLLLGYQSCSLK

SEQ ID NO: 155 - protein, 39 aa, Artificial Sequence
  derived and/or modified protein sequence (wt) from Homo sapiens__ENST00000643737.1__OPA1
MWRLRRAAVACCTLTVEWSRSKWISKNIKNHLTGTGCGL

SEQ ID NO: 156 - protein, 180 aa, Artificial Sequence
  derived and/or modified protein sequence (wt) from Homo sapiens__ENST00000323060.3__OPA3
MVVGAFPMAKLLYLGIRQVSKPLANRIKEAARRSEFFKTYICLPPAQLYHWLEMRTKMRIMGFNAAAIKPLNEGAAAELGAELLGEGIIFITACSCLMLEYWRHQLQQRRKEKERRVAREALRGEVGHLGLALEELQAQVQATSTQLALEELRAQLQEVRAHLCLRDPPPAPPVAPASEK

SEQ ID NO: 157 - protein, 179 aa, Artificial Sequence
  derived and/or modified protein sequence (wt) from Homo sapiens__ENST00000263275.4__OPA3
MVVGAFPMAKLLYLGIRQVSKPLANRIKEAARRSEFFKTYICLPPAQLYHWVEMRTKMRIMGFRGTVIKPLNEEAAAELGAELLGEATIFIVGGGCLVLEYWRHQAQQRHKEEEQRAAWNALRDEVGHLALALEALQAQVQAAPPQGALEELRTELQEVRAQLCNPGRSASHAVPASKK

SEQ ID NO: 158 - protein, 126 aa, Artificial Sequence
  derived and/or modified protein sequence (wt) from Homo sapiens__ENST00000544371.1__OPA3
MRTKMRIMGFRGTVIKPLNEEAAAELGAELLGEATIFIVGGGCLVLEYWRHQAQQRHKEEEQRAAWNALRDEVGHLALALEALQAQVQAAPPQGALEELRTELQEVRAQLCNPGRSASHAVPASKK

SEQ ID NO: 159 - protein, 577 aa, Artificial Sequence
  derived and/or modified protein sequence (wt) from Homo sapiens__ENST00000378748.7__OPTN
MSHQPLSCLTEKEDSPSESTGNGPPHLAHPNLDTFTPEELLQQMKELLTENHQLKEAMKLNNQAMKGRFEELSAWTEKQKEERQFFEIQSKEAKERLMALSHENEKLKEELGKLKGKSERSSEDPTDDSRLPRAEAEQEKDQLRTQVVRLQAEKADLLGIVSELQLKLNSSGSSEDSFVEIRMAEGEAEGSVKEIKHSPGPTRTVSTGTALSKYRSRSADGAKNYFEHEELTVSQLLLCLREGNQKVERLEVALKEAKERVSDFEKKTSNRSEIETQTEGSTEKENDEEKGPETVGSEVEALNLQVTSLFKELQEAHTKLSEAELMKKRLQEKCQALERKNSAIPSELNEKQELVYTNKKLELQVESMLSEIKMEQAKTEDEKSKLTVLQMTHNKLLQEHNNALKTIEELTRKESEKVDRAVLKELSEKLELAEKALASKQLQMDEMKQTIAKQEEDLETMTILRAQMEVYCSDFHAERAAREKIHEEKEQLALQLAVLLKENDAFEDGGRQSLMEMQSRHGARTSDSDQQAYLVQRGAEDRDWRQQRNIPIHSCPKCGEVLPDIDTLQIHVMDCII

SEQ ID NO: 160 - protein, 571 aa, Artificial Sequence
  derived and/or modified protein sequence (wt) from Homo sapiens__ENST00000378764.6__OPTN
MSHQPLSCLTEKEDSPSESTGNGPPHLAHPNLDTFTPEELLQQMKELLTENHQLKEAMKLNNQAMKGRFEELSAWTEKQKEERQFFEIQSKEAKERLMALSHENEKLKEELGKLKGKSERSSEDPTDDSRLPRAEAEQEKDQLRTQVVRLQAEKADLLGIVSELQLKLNSSGSSEDSFVEIRMAEGEAEGSVKEIKHSPGPTRTVSTGTSRSADGAKNYFEHEELTVSQLLLCLREGNQKVERLEVALKEAKERVSDFEKKTSNRSEIETQTEGSTEKENDEEKGPETVGSEVEALNLQVTSLFKELQEAHTKLSEAELMKKRLQEKCQALERKNSAIPSELNEKQELVYTNKKLELQVESMLSEIKMEQAKTEDEKSKLTVLQMTHNKLLQEHNNALKTIEELTRKESEKVDRAVLKELSEKLELAEKALASKQLQMDEMKQTIAKQEEDLETMTILRAQMEVYCSDFHAERAAREKIHEEKEQLALQLAVLLKENDAFEDGGRQSLMEMQSRHGARTSDSDQQAYLVQRGAEDRDWRQQRNIPIHSCPKCGEVLPDIDTLQIHVMDCII

SEQ ID NO: 161 - protein, 62 aa, Artificial Sequence
  derived and/or modified protein sequence (wt) from Homo sapiens__ENST00000430081.5__OPTN
MSHQPLSCLTEKEDSPSESTGNGPPHLAHPNLDTFTPEELLQQMKELLTENHQLKEPCGQVD

SEQ ID NO: 162 - protein, 58 aa, Artificial Sequence
  derived and/or modified protein sequence (wt) from Homo sapiens__ENST00000482140.5__OPTN
MSHQPLSCLTEKEDSPSESTGNGPPHLAHPNLDTFTPEELLQQMKELLTENHQLKGPH

SEQ ID NO: 163 - protein, 211 aa, Artificial Sequence [sequence omitted]

SEQ ID NO: 164 - protein, 196 aa, Artificial Sequence
  derived and/or modified protein sequence (wt) from Homo sapiens__ENST00000402802.7__PDGFA
MRTLACLLLLGCGYLAHVLAEEAEIPREVIERLARSQIHSIRDLQRLLEIDSVGSEDSLDTSLRAHGVHATKHVPEKRPLPIRRKRSIEEAVPAVCKTRTVIYEIPRSQVDPTSANFLIWPPCVEVKRCTGCCNTSSVKCQPSRVHHRSVKVAKVEYVRKKPKLKEVQVRLEEHLECACATTSLNPDYREEDTDVR

SEQ ID NO: 165 - protein, 241 aa, Artificial Sequence
  derived and/or modified protein sequence (wt) from Homo sapiens__ENST00000331163.10__PDGFB
MNRCWALFLSLCCYLRLVSAEGDPIPEELYEMLSDHSIRSFDDLQRLLHGDPGEEDGAELDLNMTRSHSGGELESLARGRRSLGSLTIAEPAMIAECKTRTEVFEISRRLIDRTNANFLVWPPCVEVQRCSGCCNNRNVQCRPTQVQLRPVQVRKIEIVRKKPIFKKATVTLEDHLACKCETVAAARPVTRSPGGSQEQRAKTPQTRVTIRTVRVRRPPKGKHRKFKHTHDKTALKETLGA

SEQ ID NO: 166 - protein, 226 aa, Artificial Sequence
  derived and/or modified protein sequence (wt) from Homo sapiens__ENST00000381551.8__PDGFB
MFIMGLGDPIPEELYEMLSDHSIRSFDDLQRLLHGDPGEEDGAELDLNMTRSHSGGELESLARGRRSLGSLTIAEPAMIAECKTRTEVFEISRRLIDRTNANFLVWPPCVEVQRCSGCCNNRNVQCRPTQVQLRPVQVRKIEIVRKKPIFKKATVTLEDHLACKCETVAAARPVTRSPGGSQEQRAKTPQTRVTIRTVRVRRPPKGKHRKFKHTHDKTALKETLGA

SEQ ID NO: 167 - protein, 345 aa, Artificial Sequence
  derived and/or modified protein sequence (wt) from Homo sapiens__ENST00000502773.5__PDGFC
MSLFGLLLLTSALAGQRQGTQAESNLSSKFQFSSNKEQNGVQDPQHERIITVSTNGSIHSPRFPHTYPRNTVLVWRLVAVEENVWIQLTFDERFGLEDPEDDICKYDFVEVEEPSDGTILGRWCGSGTVPGKQISKGNQIRIRFVSDEYFPSEPGFCIHYNIVMPQFTEAVSPSVLPPSALPLDLLNNAITAFSTLEDLIRYLEPERWQLDLEDLYRPTWQLLGKAFVFGRKSRVVDLNLLTEEVRLYSCTPRNFSVSIREELKRTDTIFWPGCLLVKRCGGNCACCLHNCNECQCVPSKVTKKYHEVLQLRPKTGVRGLHKSLTDVALEHHEECDCVCRGSTGG

SEQ ID NO: 168 - protein, 282 aa, Artificial Sequence
  derived and/or modified protein sequence (wt) from Homo sapiens__ENST00000422544.2__PDGFC
MSLFGLLLLTSALAGQRQGTQAESNLSSKFQFSSNKEQNGVQDPQHERIITVSTNGSIHSPRFPHTYPRNTVLVWRLVAVEENVWIQLTFDERFGLEDPEDDICKYDFVEVEEPSDGTILGRWCGSGTVPGKQISKGNQIRIRFVSDEYFPSEPGFCIHYNIVMPQFTEAVSPSVLPPSALPLDLLNNAITAFSTLEDLIRYLEPERWQLDLEDLYRPTWQLLGKAFVFGRKSRVVDLNLLTEEVLQLRPKTGVRGLHKSLTDVALEHHEECDCVCRGSTGG

SEQ ID NO: 169 - protein, 50 aa, Artificial Sequence
  derived and/or modified protein sequence (wt) from Homo sapiens__ENST00000274071.6__PDGFC
MSLFGLLLLTSALAGQRQGTQAESNLSSKFQFSSNKEQNGRNYIQASGLA

SEQ ID NO: 170 - protein, 370 aa, Artificial Sequence
  derived and/or modified protein sequence (wt) from Homo sapiens__ENST00000393158.6__PDGFD
MHRLIFVYTLICANFCSCRDTSATPQSASIKALRNANLRRDESNHLTDLYRRDETIQVKGNGYVQSPRFPNSYPRNLLLTWRLHSQENTRIQLVFDNQFGLEEAENDICRYDFVEVEDISETSTIIRGRWCGHKEVPPRIKSRTNQIKITFKSDDYFVAKPGFKIYYSLLEDFQPAAASETNWESVTSSISGVSYNSPSVTDPTLIADALDKKIAEFDTVEDLLKYFNPESWQEDLENMYLDTPRYRGRSYHDRKSKVDLDRLNDDAKRYSCTPRNYSVNIREELKLANVVFFPRCLLVQRCGGNCGCGTVNWRSCTCNSGKTVKKYHEVLQFEPGHIKRRGRAKTMALVDIQLDHHERCDCICSSRPPR

SEQ ID NO: 171 - protein, 364 aa, Artificial Sequence
  derived and/or modified protein sequence (wt) from Homo sapiens__ENST00000302251.9__PDGFD
MHRLIFVYTLICANFCSCRDTSATPQSASIKALRNANLRRDDLYRRDETIQVKGNGYVQSPRFPNSYPRNLLLTWRLHSQENTRIQLVFDNQFGLEEAENDICRYDFVEVEDISETSTIIRGRWCGHKEVPPRIKSRTNQIKITFKSDDYFVAKPGFKIYYSLLEDFQPAAASETNWESVTSSISGVSYNSPSVTDPTLIADALDKKIAEFDTVEDLLKYFNPESWQEDLENMYLDTPRYRGRSYHDRKSKVDLDRLNDDAKRYSCTPRNYSVNIREELKLANVVFFPRCLLVQRCGGNCGCGTVNWRSCTCNSGKTVKKYHEVLQFEPGHIKRRGRAKTMALVDIQLDHHERCDCICSSRPPR

SEQ ID NO: 172 - protein, 1089 aa, Artificial Sequence
  derived and/or modified protein sequence (wt) from Homo sapiens__ENST00000257290.9__PDGFRA
MGTSHPAFLVLGCLLTGLSLILCQLSLPSILPNENEKVVQLNSSFSLRCFGESEVSWQYPMSEEESSDVEIRNEENNSGLFVTVLEVSSASAAHTGLYTCYYNHTQTEENELEGRHIYIYVPDPDVAFVPLGMTDYLVIVEDDDSAIIPCRTTDPETPVTLHNSEGVVPASYDSRQGFNGTFTVGPYICEATVKGKKFQTIPFNVYALKATSELDLEMEALKTVYKSGETIVVTCAVFNNEVVDLQWTYPGEVKGKGITMLEEIKVPSIKLVYTLTVPEATVKDSGDYECAARQATREVKEMKKVTISVHEKGFIEIKPTFSQLEAVNLHEVKHFVVEVRAYPPPRISWLKNNLTLIENLTEITTDVEKIQEIRYRSKLKLIRAKEEDSGHYTIVAQNEDAVKSYTFELLTQVPSSILDLVDDHHGSTGGQTVRCTAEGTPLPDIEWMICKDIKKCNNETSWTILANNVSNIITEIHSRDRSTVEGRVTFAKVEETIAVRCLAKNLLGAENRELKLVAPTLRSELTVAAAVLVLLVIVIISLIVLVVIWKQKPRYEIRWRVIESISPDGHEYIYVDPMQLPYDSRWEFPRDGLVLGRVLGSGAFGKVVEGTAYGLSRSQPVMKVAVKMLKPTARSSEKQALMSELKIMTHLGPHLNIVNLLGACTKSGPIYIITEYCFYGDLVNYLHKNRDSFLSHHPEKPKKELDIFGLNPADESTRSYVILSFENNGDYMDMKQADTTQYVPMLERKEVSKYSDIQRSLYDRPASYKKKSMLDSEVKNLLSDDNSEGLTLLDLLSFTYQVARGMEFLASKNCVHRDLAARNVLLAQGKIVKICDFGLARDIMHDSNYVSKGSTFLPVKWMAPESIFDNLYTTLSDVWSYGILLWEIFSLGGTPYPGMMVDSTFYNKIKSGYRMAKPDHATSEVYEIMVKCWNSEPEKRPSFYHLSEIVENLLPGQYKKSYEKIHLDFLKSDHPAVARMRVDSDNAYIGVTYKNEEDKLKDWEGGLDEQRLSADSGYIIPLPDIDPVPEEEDLGKRNRHSSQTSEESAIETGSSSSTFIKREDETIEDIDMMDDIGIDSSDLVEDSFL

SEQ ID NO: 173 - protein, 743 aa, Artificial Sequence
  derived and/or modified protein sequence (wt) from Homo sapiens__ENST00000509490.5__PDGFRA
MGTSHPAFLVLGCLLTGLSLILCQLSLPSILPNENEKVVQLNSSFSLRCFGESEVSWQYPMSEEESSDVEIRNEENNSGLFVTVLEVSSASAAHTGLYTCYYNHTQTEENELEGRHIYIYVPDPDVAFVPLGMTDYLVIVEDDDSAIIPCRTTDPETPVTLHNSEGVVPASYDSRQGFNGTFTVGPYICEATVKGKKFQTIPFNVYALKATSELDLEMEALKTVYKSGETIVVTCAVFNNEVVDLQWTYPGEVKGKGITMLEEIKVPSIKLVYTLTVPEATVKDSGDYECAARQATREVKEMKKVTISVHEKGFIEIKPTFSQLEAVNLHEVKHFVVEVRAYPPPRISWLKNNLTLIENLTEITTDVEKIQEIRYRSKLKLIRAKEEDSGHYTIVAQNEDAVKSYTFELLTQVPSSILDLVDDHHGSTGGQTVRCTAEGTPLPDIEWMICKDIKKCNNETSWTILANNVSNIITEIHSRDRSTVEGRVTFAKVEETIAVRCLAKNLLGAENRELKLVAPTLRSELTVAAAVLVLLVIVIISLIVLVVIWKQKPRYEIRWRVIESISPDGHEYIYVDPMQLPYDSRWEFPRDGLVLGRVLGSGAFGKVVEGTAYGLSRSQPVMKVAVKMLKPTARSSEKQALMSELKIMTHLGPHLNIVNLLGACTKSGPIYIITEYCFYGDLVNYLHKNRDSFLSHHPEKPKKELDIFGLNPADESTRSSGQGCLSSGTLQELSVDLQARGPC

SEQ ID NO: 174 - protein, 218 aa, Artificial Sequence
  derived and/or modified protein sequence (wt) from Homo sapiens__ENST00000508170.5__PDGFRA
MGTSHPAFLVLGCLLTGLSLILCQLSLPSILPNENEKVVQLNSSFSLRCFGESEVSWQYPMSEEESSDVEIRNEENNSGLFVTVLEVSSASAAHTGLYTCYYNHTQTEENELEGRHIYIYVPDPDVAFVPLGMTDYLVIVEDDDSAIIPCRTTDPETPVTLHNSEGVVPASYDSRQGFNGTFTVGPYICEATVKGKKFQTIPFNVYALKGTCIISFLL

SEQ ID NO: 175 - protein, 1106 aa, Artificial Sequence
  derived and/or modified protein sequence (wt) from Homo sapiens__ENST00000261799.8__PDGFRB
MRLPGAMPALALKGELLLLSLLLLLEPQISQGLVVTPPGPELVLNVSSTFVLTCSGSAPVVWERMSQEPPQEMAKAQDGTFSSVLTLTNLTGLDTGEYFCTHNDSRGLETDERKRLYIFVPDPTVGFLPNDAEELFIFLTEITEITIPCRVTDPQLVVTLHEKKGDVALPVPYDHQRGFSGIFEDRSYICKTTIGDREVDSDAYYVYRLQVSSINVSVNAVQTVVRQGENITLMCIVIGNEVVNFEWTYPRKESGRLVEPVTDFLLDMPYHIRSILHIPSAELEDSGTYTCNVTESVNDHQDEKAINITVVESGYVRLLGEVGTLQFAELHRSRTLQVVFEAYPPPTVLWFKDNRTLGDSSAGEIALSTRNVSETRYVSELTLVRVKVAEAGHYTMRAFHEDAEVQLSFQLQINVPVRVLELSESHPDSGEQTVRCRGRGMPQPNIIWSACRDLKRCPRELPPTLLGNSSEEESQLETNVTYWEEEQEFEVVSTLRLQHVDRPLSVRCTLRNAVGQDTQEVIVVPHSLPFKVVVISAILALVVLTIISLIILIMLWQKKPRYEIRWKVIESVSSDGHEYIYVDPMQLPYDSTWELPRDQLVLGRTLGSGAFGQVVEATAHGLSHSQATMKVAVKMLKSTARSSEKQALMSELKIMSHLGPHLNVVNLLGACTKGGPIYIITEYCRYGDLVDYLHRNKHTFLQHHSDKRRPPSAELYSNALPVGLPLPSHVSLTGESDGGYMDMSKDESVDYVPMLDMKGDVKYADIESSNYMAPYDNYVPSAPERTCRATLINESPVLSYMDLVGFSYQVANGMEFLASKNCVHRDLAARNVLICEGKLVKICDFGLARDIMRDSNYISKGSTFLPLKWMAPESIFNSLYTTLSDVWSFGILLWEIFTLGGTPYPELPMNEQFYNAIKRGYRMAQPAHASDEIYEIMQKCWEEKFEIRPPFSQLVLLLERLLGEGYKKKYQQVDEEFLRSDHPAILRSQARLPGFHGLRSPLDTSSVLYTAVQPNEGDNDYIIPLPDPKPEVADEGPLEGSPSLASSTLNEVNTSSTISCDSPLEPQDEPEPEPQLELQVEPEPELEQLPDSGCPAPRAEAEDSFL

SEQ ID NO: 176 - protein, 239 aa, Artificial Sequence
  derived and/or modified protein sequence (wt) from Homo sapiens__ENST00000520579.5__PDGFRB
MRLPGAMPALALKGELLLLSLLLLLEPQISQGLVVTPPGPELVLNVSSTFVLTCSGSAPVVWERMSQEPPQEMAKAQDGTFSSVLTLTNLTGLDTGEYFCTHNDSRGLETDERKRLYIFVPDPTVGFLPNDAEELFIFLTEITEITIPCRVTDPQLVVTLHEKKGDVALPVPYDHQRGFSGIFEDRSYICKTTIGDREVDSDAYYVYRLQGEPPFWPDAQQSVIHQRLCERSADCGPPG

SEQ ID NO: 177 - protein, 221 aa, Artificial Sequence
  derived and/or modified protein sequence (wt) from Homo sapiens__ENST00000405431.2__PGF
MPVMRLFPCFLQLLAGLALPAVPPQQWALSAGNGSSEVEVVPFQEVWGRSYCRALERLVDVVSEYPSEVEHMFSPSCVSLLRCTGCCGDENLHCVPVETANVTMQLLKIRSGDRPSYVELTFSQHVRCECRHSPGRQSPDMPGDFRADAPSFLPPRRSLPMLFRMEWGCALTGSQSAVWPSSPVPEEIPRMHPGRNGKKQQRKPLREKMKPERCGDAVPRR

SEQ ID NO: 178 - protein, 170 aa, Artificial Sequence
  derived and/or modified protein sequence (wt) from Homo sapiens__ENST00000555567.5__PGF
MPVMRLFPCFLQLLAGLALPAVPPQQWALSAGNGSSEVEVVPFQEVWGRSYCRALERLVDVVSEYPSEVEHMFSPSCVSLLRCTGCCGDENLHCVPVETANVTMQLLKIRSGDRPSYVELTFSQHVRCECRPLREKMKPERRRPKGRGKRRREKQRPTDCHLCGDAVPRR

SEQ ID NO: 179 - protein, 169 aa, Artificial Sequence
  derived and/or modified protein sequence (wt) from Homo sapiens__ENST00000238607.10__PGF
MPVMRLFPCFLQLLAGLALPAVPPQWALSAGNGSSEVEVVPFQEVWGRSYCRALERLVDVVSEYPSEVEHMFSPSCVSLLRCTGCCGDENLHCVPVETANVTMQLLKIRSGDRPSYVELTFSQHVRCECRPLREKMKPERRRPKGRGKRRREKQRPTDCHLCGDAVPRR

SEQ ID NO: 180 - protein, 149 aa, Artificial Sequence
  derived and/or modified protein sequence (wt) from Homo sapiens__ENST00000553716.5__PGF
MPVMRLFPCFLQLLAGLALPAVPPQQWALSAGNGSSEVEVVPFQEVWGRSYCRALERLVDVVSEYPSEVEHMFSPSCVSLLRCTGCCGDENLHCVPVETANVTMQLLKIRSGDRPSYVELTFSQHVRCECRPLREKMKPERCGDAVPRR

SEQ ID NO: 181 - protein, 1925 aa, Artificial Sequence
  derived and/or modified protein sequence (wt) from Homo sapiens__ENST00000324093.8__PLXND1
MAPRAAGGAPLSARAAAASPPPFQTPPRCPVPLLLLLLLGAARAGALEIQRRFPSPTPTNNFALDGAAGTVYLAAVNRLYQLSGANLSLEAEAAVGPVPDSPLCHAPQLPQASCEHPRRLTDNYNKILQLDPGQGLVVVCGSIYQGFCQLRRRGNISAVAVRFPPAAPPAEPVTVFPSMLNVAANHPNASTVGLVLPPAAGAGGSRLLVGATYTGYGSSFFPRNRSLEDHRFENTPEIAIRSLDTRGDLAKLFTFDLNPSDDNILKIKQGAKEQHKLGFVSAFLHPSDPPPGAQSYAYLALNSEARAGDKESQARSLLARICLPHGAGGDAKKLTESYIQLGLQCAGGAGRGDLYSRLVSVFPARERLFAVFERPQGSPAARAAPAALCAFRFADVRAAIRAARTACFVEPAPDVVAVLDSVVQGTGPACERKLNIQLQPEQLDCGAAHLQHPLSILQPLKATPVFRAPGLTSVAVASVNNYTAVFLGTVNGRLLKINLNESMQVVSRRVVTVAYGEPVHHVMQFDPADSGYLYLMTSHQMARVKVAACNVHSTCGDCVGAADAYCGWCALETRCTLQQDCTNSSQQHFWTSASEGPSRCPAMTVLPSEIDVRQEYPGMILQISGSLPSLSGMEMACDYGNNIRTVARVPGPAFGHQIAYCNLLPRDQFPPFPPNQDHVTVEMSVRVNGRNIVKANFTIYDCSRTAQVYPHTACTSCLSAQWPCFWCSQQHSCVSNQSRCEASPNPTSPQDCPRTLLSPLAPVPTGGSQNILVPLANTAFFQGAALECSFGLEEIFEAVWVNESVVRCDQVVLHTTRKSQVFPLSLQLKGRPARFLDSPEPMTVMVYNCAMGSPDCSQCLGREDLGHLCMWSDGCRLRGPLQPMAGTCPAPEIHAIEPLSGPLDGGTLLTIRGRNLGRRLSDVAHGVWIGGVACEPLPDRYTVSEEIVCVTGPAPGPLSGVVTVNASKEGKSRDRFSYVLPLVHSLEPTMGPKAGGTRITIHGNDLHVGSELQVLVNDTDPCTELMRTDTSIACTMPEGALPAPVPVCVRFERRGCVHGNLTFWYMQNPVITAISPRRSPVSGGRTITVAGERFHMVQNVSMAVHHIGREPTLCKVLNSTLITCPSPGALSNASAPVDFFINGRAYADEVAVAEELLDPEEAQRGSRFRLDYLPNPQFSTAKREKWIKHHPGEPLTLVIHKEQDSLGLQSHEYRVKIGQVSCDIQIVSDRIIHCSVNESLGAAVGQLPITIQVGNFNQTIATLQLGGSETAIIVSIVICSVLLLLSVVALFVFCTKSRRAERYWQKTLLQMEEMESQIREEIRKGFAELQTDMTDLTKELNRSQGIPFLEYKHFVTRTFFPKCSSLYEERYVLPSQTLNSQGSSQAQETHPLLGEWKIPESCRPNMEEGISLFSSLLNNKHFLIVFVHALEQQKDFAVRDRCSLASLLTIALHGKLEYYTSIMKELLVDLIDASAAKNPKLMLRRTESVVEKMLTNWMSICMYSCLRETVGEPFFLLLCAIKQQINKGSIDAITGKARYTLSEEWLLRENIEAKPRNLNVSFQGCGMDSLSVRAMDTDTLTQVKEKILEAFCKNVPYSQWPRAEDVDLEWFASSTQSYILRDLDDTSVVEDGRKKLNTLAHYKIPEGASLAMSLIDKKDNTLGRVKDLDTEKYFHLVLPTDELAEPKKSHRQSHRKKVLPEIYLTRLLSTKGTLQKFLDDLFKAILSIREDKPPLAVKYFFDFLEEQAEKRGISDPDTLHIWKTNSLPLRFWVNILKNPQFVFDIDKTDHIDACLSVIAQAFIDACSISDLQLGKDSPTNKLLYAKEIPEYRKIVQRYYKQIQDMTPLSEQEMNAHLAEESRKYQNEFNTNVAMAEIYKYAKRYRPQIMAALEANPTARRTQLQHKFEQVVALMEDNIYECYSEA

SEQ ID NO: 182 - protein, 380 aa, Artificial Sequence
  derived and/or modified protein sequence (wt) from Homo sapiens__ENST00000512744.5__PLXND1
MEEGISLFSSLLNNKHFLIVFVHALEQQKDFAVRDRCSLASLLTIALHGKLEYYTSIMKELLVDLIDASAAKNPKLMLRRTESVVEKMLTNWMSICMYSCLRETVGEPFFLLLCAIKQQINKGSIDAITGKARYTLSEEWLLRENIEAKPRNLNVSFQGCGMDSLSVRAMDTDTLTQVKEKILEAFCKNVPYSQWPRAEDVDLEWFASSTQSYILRDLDDTSVVEDGRKKLNTLAHYKIPEGASLAMSLIDKKDNTLGRVKDLDTEKYFHLVLPTDELAEPKKSHRQSHRKKVLPEIYLTRLLSTKGTLQKFLDDLFKAILSIREDKPPLAVKYFFDFLEEQAEKRGISDPDTLHIWKTNRWRPSSPVLGEHPEEPPVCL

SEQ ID NO: 183 - protein, 55 aa, Artificial Sequence
  derived and/or modified protein sequence (wt) from Homo sapiens__ENST00000504689.1__PLXND1
MTPLSEQEMNAHLAEESRKYQNEFNTNVAMAEIYKYAKRYRPQLLYIKKRIMHQL

SEQ ID NO: 184 - protein, 521 aa, Artificial Sequence
  derived and/or modified protein sequence (wt) from Homo sapiens__ENST00000394854.7__PPP3CA
MSEPKAIDPKLSTTDRVVKAVPFPPSHRLTAKEVFDNDGKPRVDILKAHLMKEGRLEESVALRIITEGASILRQEKNLLDIDAPVTVCGDIHGQFFDLMKLFEVGGSPANTRYLFLGDYVDRGYFSIECVLYLWALKILYPKTLFLLRGNHECRHLTEYFTFKQECKIKYSERVYDACMDAFDCLPLAALMNQQFLCVHGGLSPEINTLDDIRKLDRFKEPPAYGPMCDILWSDPLEDFGNEKTQEHFTHNTVRGCSYFYSYPAVCEFLQHNNLLSILRAHEAQDAGYRMYRKSQTTGFPSLITIFSAPNYLDVYNNKAAVLKYENNVMNIRQFNCSPHPYWLPNFMDVFTWSLPFVGEKVTEMLVNVLNICSDDELGSEEDGFDGATAAARKEVIRNKIRAIGKMARVFSVLREESESVLTLKGLTPTGMLPSGVLSGGKQTLQSATVEAIEADEAIKGFSPQHKITSFEEAKGLDRINERMPPRRDAMPSDANLNSINKALTSETNGTDSNGSNSSNIQ

SEQ ID NO: 185 - protein, 511 aa, Artificial Sequence
  derived and/or modified protein sequence (wt) from Homo sapiens__ENST00000394853.8__PPP3CA
MSEPKAIDPKLSTTDRVVKAVPFPPSHRLTAKEVFDNDGKPRVDILKAHLMKEGRLEESVALRIITEGASILRQEKNLLDIDAPVTVCGDIHGQFFDLMKLFEVGGSPANTRYLFLGDYVDRGYFSIECVLYLWALKILYPKTLFLLRGNHECRHLTEYFTFKQECKIKYSERVYDACMDAFDCLPLAALMNQQFLCVHGGLSPEINTLDDIRKLDRFKEPPAYGPMCDILWSDPLEDFGNEKTQEHFTHNTVRGCSYFYSYPAVCEFLQHNNLLSILRAHEAQDAGYRMYRKSQTTGFPSLITIFSAPNYLDVYNNKAAVLKYENNVMNIRQFNCSPHPYWLPNFMDVFTWSLPFVGEKVTEMLVNVLNICSDDELGSEEDGFDGATAAARKEVIRNKIRAIGKMARVFSVLREESESVLTLKGLTPTGMLPSGVLSGGKQTLQSAIKGFSPQHKITSFEEAKGLDRINERMPPRRDAMPSDANLNSINKALTSETNGTDSNGSNSSNIQ

SEQ ID NO: 186 - protein, 469 aa, Artificial Sequence
  derived and/or modified protein sequence (wt) from Homo sapiens__ENST00000323055.10__PPP3CA
MSEPKAIDPKLSTTDRVVKAVPFPPSHRLTAKEVFDNDGKPRVDILKAHLMKEGRLEESVALRIITEGASILRQEKNLLDIDAPVTVCGDIHGQFFDLMKLFEVGGSPANTRYLFLGDYVDRGYFSIECVLYLWALKILYPKTLFLLRGNHECRHLTEYFTFKQECKIKYSERVYDACMDAFDCLPLAALMNQQFLCVHGGLSPEINTLDDIRKLDRFKEPPAYGPMCDILWSDPLEDFGNEKTQEHFTHNTVRGCSYFYSYPAVCEFLQHNNLLSILRAHEAQDAGYRMYRKSQTTGFPSLITIFSAPNYLDVYNNKVTEMLVNVLNICSDDELGSEEDGFDGATAAARKEVIRNKIRAIGKMARVFSVLREESESVLTLKGLTPTGMLPSGVLSGGKQTLQSAIKGFSPQHKITSFEEAKGLDRINERMPPRRDAMPSDANLNSINKALTSETNGTDSNGSNSSNIQ

SEQ ID NO: 187 - protein, 423 aa, Artificial Sequence
  derived and/or modified protein sequence (wt) from Homo sapiens__ENST00000507176.5__PPP3CA
MKLFEVGGSPANTRYLFLGDYVDRGYFSIECVLYLWALKILYPKTLFLLRGNHECRHLTEYFTFKQECKIKYSERVYDACMDAFDCLPLAALMNQQFLCVHGGLSPEINTLDDIRKLDRFKEPPAYGPMCDILWSDPLEDFGNEKTQEHFTHNTVRGCSYFYSYPAVCEFLQHNNLLSILRAHEAQDAGYRMYRKSQTTGFPSLITIFSAPNYLDVYNNKAAVLKYENNVMNIRQFNCSPHPYWLPNFMDVFTWSLPFVGEKVTEMLVNVLNICSDDELGSEEDGFDGATAAARKEVIRNKIRAIGKMARVFSVLREESESVLTLKGLTPTGMLPSGVLSGGKQTLQSATVEAIEADEAIKGFSPQHKITSFEEAKGLDRINERMPPRRDAMPSDANLNSINKALTSETNGTDSNGSNSSNIQ

SEQ ID NO: 188 - protein, 289 aa, Artificial Sequence
  derived and/or modified protein sequence (wt) from Homo sapiens__ENST00000512215.5__PPP3CA
MSEPKAIDPKLSTTDRVVKAVPFPPSHRLTAKEVFDNDGKPRVDILKAHLMKEGRLEESVALRIITEGASILRQEKNLLDIDAPVTAAVLKYENNVMNIRQFNCSPHPYWLPNFMDVFTWSLPFVGEKVTEMLVNVLNICSDDELGSEEDGFDGATAAARKEVIRNKIRAIGKMARVFSVLREESESVLTLKGLTPTGMLPSGVLSGGKQTLQSATVEAIEADEAIKGFSPQHKITSFEEAKGLDRINERMPPRRDAMPSDANLNSINKALTSETNGTDSNGSNSSNIQ

SEQ ID NO: 189 - protein, 525 aa, Artificial Sequence
  derived and/or modified protein sequence (wt) from Homo sapiens__ENST00000394829.6__PPP3CB
MAAPEPARAAPPPPPPPPPPPGADRVVKAVPFPPTHRLTSEEVFDLDGIPRVDVLKNHLVKEGRVDEEIALRIINEGAAILRREKTMIEVEAPITVCGDIHGQFFDLMKLFEVGGSPANTRYLFLGDYVDRGYFSIECVLYLWVLKILYPSTLFLLRGNHECRHLTEYFTFKQECKIKYSERVYEACMEAFDSLPLAALLNQQFLCVHGGLSPEIHTLDDIRRLDRFKEPPAFGPMCDLLWSDPSEDFGNEKSQEHFSHNTVRGCSYFYNYPAVCEFLQNNNLLSIIRAHEAQDAGYRMYRKSQTTGFPSLITIFSAPNYLDVYNNKAAVLKYENNVMNIRQFNCSPHPYWLPNFMDVFTWSLPFVGEKVTEMLVNVLSICSDDELMTEGEDQFDVGSAAARKEIIRNKIRAIGKMARVFSVLREESESVLTLKGLTPTGMLPSGVLAGGRQTLQSATVEAIEAEKAIRGFSPPHRICSFEEAKGLDRINERMPPRKDAVQQDGFNSLNTAHATENHGTGNHTAQ

SEQ ID NO: 190 - protein, 524 aa, Artificial Sequence
  derived and/or modified protein sequence (wt) from Homo sapiens__ENST00000360663.9__PPP3CB
MAAPEPARAAPPPPPPPPPPPGADRVVKAVPFPPTHRLTSEEVFDLDGIPRVDVLKNHLVKEGRVDEEIALRIINEGAAILRREKTMIEVEAPITVCGDIHGQFFDLMKLFEVGGSPANTRYLFLGDYVDRGYFSIECVLYLWVLKILYPSTLFLLRGNHECRHLTEYFTFKQECKIKYSERVYEACMEAFDSLPLAALLNQQFLCVHGGLSPEIHTLDDIRRLDRFKEPPAFGPMCDLLWSDPSEDFGNEKSQEHFSHNTVRGCSYFYNYPAVCEFLQNNNLLSIIRAHEAQDAGYRMYRKSQTTGFPSLITIFSAPNYLDVYNNKAAVLKYENNVMNIRQFNCSPHPYWLPNFMDVFTWSLPFVGEKVTEMLVNVLSICSDDELMTEGEDQFDGSAAARKEIIRNKIRAIGKMARVFSVLREESESVLTLKGLTPTGMLPSGVLAGGRQTLQSATVEAIEAEKAIRGFSPPHRICSFEEAKGLDRINERMPPRKDAVQQDGFNSLNTAHATENHGTGNHTAQ

SEQ ID NO: 191 - protein, 515 aa, Artificial Sequence
  derived and/or modified protein sequence (wt) from Homo sapiens__ENST00000394828.6__PPP3CB
MAAPEPARAAPPPPPPPPPPPGADRVVKAVPFPPTHRLTSEEVFDLDGIPRVDVLKNHLVKEGRVDEEIALRIINEGAAILRREKTMIEVEAPITVCGDIHGQFFDLMKLFEVGGSPANTRYLFLGDYVDRGYFSIECVLYLWVLKILYPSTLFLLRGNHECRHLTEYFTFKQECKIKYSERVYEACMEAFDSLPLAALLNQQFLCVHGGLSPEIHTLDDIRRLDRFKEPPAFGPMCDLLWSDPSEDFGNEKSQEHFSHNTVRGCSYFYNYPAVCEFLQNNNLLSIIRAHEAQDAGYRMYRKSQTTGFPSLITIFSAPNYLDVYNNKAAVLKYENNVMNIRQFNCSPHPYWLPNFMDVFTWSLPFVGEKVTEMLVNVLSICSDDELMTEGEDQFDVGSAAARKEIIRNKIRAIGKMARVFSVLREESESVLTLKGLTPTGMLPSGVLAGGRQTLQSAIRGFSPPHRICSFEEAKGLDRINERMPPRKDAVQQDGFNSLNTAHATENHGTGNHTAQ

SEQ ID NO: 192 - protein, 496 aa, Artificial Sequence
  derived and/or modified protein sequence (wt) from Homo sapiens__ENST00000342558.3__PPP3CB
MAAPEPARAAPPPPPPPPPPPGADRVVKAVPFPPTHRLTSEEVFDLDGIPRVDVLKNHLVKEGRVDEEIALRIINEGAAILRREKTMIEVEAPITVCGDIHGQFFDLMKLFEVGGSPANTRYLFLGDYVDRGYFSIECVLYLWVLKILYPSTLFLLRGNHECRHLTEYFTFKQECKIKYSERVYEACMEAFDSLPLAALLNQQFLCVHGGLSPEIHTLDDIRRLDRFKEPPAFGPMCDLLWSDPSEDFGNEKSQEHFSHNTVRGCSYFYNYPAVCEFLQNNNLLSIIRAHEAQDAGYRMYRKSQTTGFPSLITIFSAPNYLDVYNNKAAVLKYENNVMNIRQFNCSPHPYWLPNFMDVFTWSLPFVGEKVTEMLVNVLSICSDDELMTEGEDQFDGSAAARKEIIRNKIRAIGKMARVFSVLREESESVLTLKGLTPTGMLPSGVLAGGRQTLQSGNDVMQLAVPQMDWGTPHSFANNSHNACREFLLFFSSCLSS

SEQ ID NO: 193 - protein, 521 aa, Artificial Sequence
  derived and/or modified protein sequence (wt) from Homo sapiens__ENST00000397775.7__PPP3CC
MSGRRFHLSTTDRVIKAVPFPPTQRLTFKEVFENGKPKVDVLKNHLVKEGRLEEEVALKIINDGAAILRQEKTMIEVDAPITVCGDIHGQFFDLMKLFEVGGSPSNTRYLFLGDYVDRGYFSIECVLYLWSLKINHPKTLFLLRGNHECRHLTDYFTFKQECRIKYSEQVYDACMETFDCLPLAALLNQQFLCVHGGMSPEITSLDDIRKLDRFTEPPAFGPVCDLLWSDPSEDYGNEKTLEHYTHNTVRGCSYFYSYPAVCEFLQNNNLLSIIRAHEAQDAGYRMYRKSQATGFPSLITIFSAPNYLDVYNNKAAVLKYENNVMNIRQFNCSPHPYWLPNFMDVFTWSLPFVGEKVTEMLVNVLNICSDDELISDDEAEDHYIPSYQKGSTTVRKEIIRNKIRAIGKMARVFSILRQESESVLTLKGLTPTGTLPLGVLSGGKQTIETATVEAVEAREAIRGFSLQHKIRSFEEARGLDRINERMPPRKDSIHAGGPMKSVTSAHSHAAHRSDQGKKAHS

SEQ ID NO: 194 - protein, 512 aa, Artificial Sequence
  derived and/or modified protein sequence (wt) from Homo sapiens__ENST00000240139.9__PPP3CC
MSGRRFHLSTTDRVIKAVPFPPTQRLTFKEVFENGKPKVDVLKNHLVKEGRLEEEVALKIINDGAAILRQEKTMIEVDAPITVCGDIHGQFFDLMKLFEVGGSPSNTRYLFLGDYVDRGYFSIECVLYLWSLKINHPKTLFLLRGNHECRHLTDYFTFKQECRIKYSEQVYDACMETFDCLPLAALLNQQFLCVHGGMSPEITSLDDIRKLDRFTEPPAFGPVCDLLWSDPSEDYGNEKTLEHYTHNTVRGCSYFYSYPAVCEFLQNNNLLSIIRAHEAQDAGYRMYRKSQATGFPSLITIFSAPNYLDVYNNKAAVLKYENNVMNIRQFNCSPHPYWLPNFMDVFTWSLPFVGEKVTEMLVNVLNICSDDELISDDEAEGSTTVRKEIIRNKIRAIGKMARVFSILRQESESVLTLKGLTPTGTLPLGVLSGGKQTIETATVEAVEAREAIRGFSLQHKIRSFEEARGLDRINERMPPRKDSIHAGGPMKSVTSAHSHAAHRSDQGKKAHS

SEQ ID NO: 195 - protein, 502 aa, Artificial Sequence
  derived and/or modified protein sequence (wt) from Homo sapiens__ENST00000289963.12__PPP3CC
MSGRRFHLSTTDRVIKAVPFPPTQRLTFKEVFENGKPKVDVLKNHLVKEGRLEEEVALKIINDGAAILRQEKTMIEVDAPITVCGDIHGQFFDLMKLFEVGGSPSNTRYLFLGDYVDRGYFSIECVLYLWSLKINHPKTLFLLRGNHECRHLTDYFTFKQECRIKYSEQVYDACMETFDCLPLAALLNQQFLCVHGGMSPEITSLDDIRKLDRFTEPPAFGPVCDLLWSDPSEDYGNEKTLEHYTHNTVRGCSYFYSYPAVCEFLQNNNLLSIIRAHEAQDAGYRMYRKSQATGFPSLITIFSAPNYLDVYNNKAAVLKYENNVMNIRQFNCSPHPYWLPNFMDVFTWSLPFVGEKVTEMLVNVLNICSDDELISDDEAEGSTTVRKEIIRNKIRAIGKMARVFSILRQESESVLTLKGLTPTGTLPLGVLSGGKQTIETAIRGFSLQHKIRSFEEARGLDRINERMPPRKDSIHAGGPMKSVTSAHSHAAHRSDQGKKAHS

SEQ ID NO: 196 - protein, 326 aa, Artificial Sequence
  derived and/or modified protein sequence (wt) from Homo sapiens__ENST00000518852.5__PPP3CC
MSGRRFHLSTTDRVIKAVPFPPTQRLTFKEVFENGKPKVDVLKNHLVKEGRLEEEVALKIINDGAAILRQEKTMIEVDAPITVCGDIHGQFFDLMKLFEVGGSPSNTRYLFLGDYVDRGYFSIECVLYLWSLKINHPKTLFLLRGNHECRHLTDYFTFKQECRIKYSEQVYDACMETFDCLPLAALLNQQFLCVHGGMSPEITSLDDIRKLDRFTEPPAFGPVCDLLWSDPSEDYGNEKTLEHYTHNTVRGCSYFYSYPAVCEFLQNNNLLSIIRAHEAQDAGYRMYRKSQATGFPSLITIFSAPNYLDVYNNKGKGIQQYLSLNL

SEQ ID NO: 197 - protein, 189 aa, Artificial Sequence
  derived and/or modified protein sequence (wt) from Homo sapiens__ENST00000409752.5__PPP3R1
MQPQCPLRRESCGMELCGKKGNEASYPLEMCSHFDADEIKRLGKRFKKLDLDNSGSLSVEEFMSLPELQQNPLVQRVIDIFDTDGNGEVDFKEFIEGVSQFSVKGDKEQKLRFAFRIYDMDKDGYISNGELFQVLKMMVGNNLKDTQLQQIVDKTIINADKDGDGRISFEEFCAVVGGLDIHKKMVVDV

SEQ ID NO: 198 - protein, 170 aa, Artificial Sequence
  derived and/or modified protein sequence (wt) from Homo sapiens__ENST00000234310.7__PPP3R1
MGNEASYPLEMCSHFDADEIKRLGKRFKKLDLDNSGSLSVEEFMSLPELQQNPLVQRVIDIFDTDGNGEVDFKEFIEGVSQFSVKGDKEQKLRFAFRIYDMDKDGYISNGELFQVLKMMVGNNLKDTQLQQIVDKTIINADKDGDGRISFEEFCAVVGGLDIHKKMVVDV

SEQ ID NO: 199 - protein, 160 aa, Artificial Sequence
  derived and/or modified protein sequence (wt) from Homo sapiens__ENST00000409377.1__PPP3R1
MCSHFDADEIKRLGKRFKKLDLDNSGSLSVEEFMSLPELQQNPLVQRVIDIFDTDGNGEVDFKEFIEGVSQFSVKGDKEQKLRFAFRIYDMDKDGYISNGELFQVLKMMVGNNLKDTQLQQIVDKTIINADKDGDGRISFEEFCAVVGGLDIHKKMVVDV

SEQ ID NO: 200 - protein, 173 aa, Artificial Sequence
  derived and/or modified protein sequence (wt) from Homo sapiens__ENST00000374806.1__PPP3R2
MSTMGNEASYPAEMCSHFDNDEIKRLGRRFKKLDLDKSGSLSVEEFMSLPELRHNPLVRRVIDVFDTDGDGEVDFKEFILGTSQFSVKGDEEQKLRFAFSIYDMDKDGYISNGELFQVLKMMVGNNLTDWQLQQLVDKTIIILDKDGDGKISFEEFSAVVRDLEIHKKLVLIV

SEQ ID NO: 201 - protein, 70 aa, Artificial Sequence
  derived and/or modified protein sequence (wt) from Homo sapiens__ENST00000636434.1__PPP3R2
MDKDGYISNGELFQVLKMMVGNNLTDWQLQQLVDKTIIILDKDGDGKISFEEFSAVVRDLEIHKKLVLIV

SEQ ID NO: 202 - protein, 346 aa, Artificial Sequence
  derived and/or modified protein sequence (wt) from Homo sapiens__ENST00000230381.6__PRPH2
MALLKVKFDQKKRVKLAQGLWLMNWFSVLAGIIIFSLGLFLKIELRKRSDVMNNSESHFVPNSLIGMGVLSCVFNSLAGKICYDALDPAKYARWKPWLKPYLAICVLFNIILFLVALCCFLLRGSLENTLGQGLKNGMKYYRDTDTPGRCFMKKTIDMLQIEFKCCGNNGFRDWFEIQWISNRYLDFSSKEVKDRIKSNVDGRYLVDGVPFSCCNPSSPRPCIQYQITNNSAHYSYDHQTEELNLWVRGCRAALLSYYSSLMNSMGVVTLLIWLFEVTITIGLRYLQTSLDGVSNPEESESESQGWLLERSVPETWKAFLESVKKLGKGNQVEAEGADAGQAPEAG

SEQ ID NO: 203 - protein, 359 aa, Artificial Sequence
  derived and/or modified protein sequence (wt) from Homo sapiens__ENST00000306051.2__PTGDR
MKSPFYRCQNTTSVEKGNSAVMGGVLFSTGLLGNLLALGLLARSGLGWCSRRPLRPLPSVFYMLVCGLTVTDLLGKCLLSPVVLAAYAQNRSLRVLAPALDNSLCQAFAFFMSFFGLSSTLQLLAMALECWLSLGHPFFYRRHITLRLGALVAPVVSAFSLAFCALPFMGFGKFVQYCPGTWCFIQMVHEEGSLSVLGYSVLYSSLMALLVLATVLCNLGAMRNLYAMHRRLQRHPRSCTRDCAEPRADGREASPQPLEELDHLLLLALMTVLFTMCSLPVIYRAYYGAFKDVKEKNRTSEEAEDLRALRFLSVISIVDPWIFIIFRSPVFRIFFHKIFIRPLRYRSRCSNSTNMESSL

SEQ ID NO: 204 - protein, 296 aa, Artificial Sequence
  derived and/or modified protein sequence (wt) from Homo sapiens__ENST00000553372.1__PTGDR
MKSPFYRCQNTTSVEKGNSAVMGGVLFSTGLLGNLLALGLLARSGLGWCSRRPLRPLPSVFYMLVCGLTVTDLLGKCLLSPVVLAAYAQNRSLRVLAPALDNSLCQAFAFFMSFFGLSSTLQLLAMALECWLSLGHPFFYRRHITLRLGALVAPVVSAFSLAFCALPFMGFGKFVQYCPGTWCFIQMVHEEGSLSVLGYSVLYSSLMALLVLATVLCNLGAMRNLYAMHRRLQRHPRSCTRDCAEPRADGREASPQPLEELDHLLLLALMTVLFTMCSLPVIAFVPGVPAKTPGSR

SEQ ID NO: 205 - protein, 395 aa, Artificial Sequence
  derived and/or modified protein sequence (wt) from Homo sapiens__ENST00000332539.4__PTGDR2
MSANATLKPLCPILEQMSRLQSHSNTSIRYIDHAAVLLHGLASLLGLVENGVILFVVGCRMRQTVVTTWVLHLALSDLLASASLPFFTYFLAVGHSWELGTTFCKLHSSIFFLNMFASGFLLSAISLDRCLQVVRPVWAQNHRTVAAAHKVCLVLWALAVLNTVPYFVFRDTISRLDGRIMCYYNVLLLNPGPDRDATCNSRQVALAVSKFLLAFLVPLAIIASSHAAVSLRLQHRGRRRPGRFVRLVAAVVAAFALCWGPYHVFSLLEARAHANPGLRPLVWRGLPFVTSLAFFNSVANPVLYVLTCPDMLRKLRRSLRTVLESVLVDDSELGGAGSSRRRRTSSTARSASPLALCSRPEEPRGPARLLGWLLGSCAASPQTGPLNRALSSTSS

SEQ ID NO: 206 - protein, 402 aa, Artificial Sequence
  derived and/or modified protein sequence (wt) from Homo sapiens__ENST00000292513.3__PTGER1
MSPCGPLNLSLAGEATTCAAPWVPNTSAVPPSGASPALPIFSMTLGAVSNLLALALLAQAAGRLRRRRSAATFLLFVASLLATDLAGHVIPGALVLRLYTAGRAPAGGACHFLGGCMVFFGLCPLLLGCGMAVERCVGVTRPLLHAARVSVARARLALAAVAAVALAVALLPLARVGRYELQYPGTWCFIGLGPPGGWRQALLAGLFASLGLVALLAALVCNTLSGLALLRARWRRRSRRPPPASGPDSRRRWGAHGPRSASASSASSIASASTFFGGSRSSGSARRARAHDVEMVGQLVGIMVVSCICWSPMLVLVALAVGGWSSTSLQRPLFLAVRLASWNQILDPWVYILLRQAVLRQLLRLLPPRAGAKGGPAGLGLTPSAWEASSLRSSRHSGLSHF

SEQ ID NO: 207 - protein, 358 aa, Artificial Sequence
  derived and/or modified protein sequence (wt) from Homo sapiens__ENST00000245457.5__PTGER2
MGNASNDSQSEDCETRQWLPPGESPAISSVMFSAGVLGNLIALALLARRWRGDVGCSAGRRSSLSLFHVLVTELVFTDLLGTCLISPVVLASYARNQTLVALAPESRACTYFAFAMTFFSLATMLMLFAMALERYLSIGHPYFYQRRVSRSGGLAVLPVIYAVSLLFCSLPLLDYGQYVQYCPGTWCFIRHGRTAYLQLYATLLLLLIVSVLACNFSVILNLIRMHRRSRRSRCGPSLGSGRGGPGARRRGERVSMAEETDHLILLAIMTITFAVCSLPFTIFAYMNETSSRKEKWDLQALRFLSINSIIDPWVFAILRPPVLRLMRSVLCCRISLRTQDATQTSCSTQSDASKQADL

SEQ ID NO: 208 - protein, 103 aa, Artificial Sequence
  derived and/or modified protein sequence (wt) from Homo sapiens__ENST00000557436.1__PTGER2
MAEETDHLILLAIMTITFAVCSLPFTIFAYMNETSSRKEKWDLQALRFLSINSIIDPWVFAILRPPVLRLMRSVLCCRISLRTQDATQTSCSTQSDASKQADL

SEQ ID NO: 209 - protein, 425 aa, Artificial Sequence
  derived and/or modified protein sequence (wt) from Homo sapiens__ENST00000497146.5__PTGER3
MKETRGYGGDAPFCTRLNHSYTGMWAPERSAEARGNLTRPPGSGEDCGSVSVAFPITMLLTGFVGNALAMLLVSRSYRRRESKRKKSFLLCIGWLALTDLVGQLLTTPVVIVVYLSKQRWEHIDPSGRLCTFFGLTMTVFGLSSLFIASAMAVERALAIRAPHWYASHMKTRATRAVLLGVWLAVLAFALLPVLGVGQYTVQWPGTWCFISTGRGGNGTSSSHNWGNLFFASAFAFLGLLALTVTFSCNLATIKALVSRCRAKATASQSSAQWGRITTETAIQLMGIMCVLSVCWSPLLIMMLKMIFNQTSVEHCKTHTEKQKECNFFLIAVRLASLNQILDPWVYLLLRKILLRKFCQMRKRRLREQAPLLPTSTVIDPSRFCAQPFRWFLDLSFPAMSSSHPQLPLTLASFKLLREPCSVQLS

SEQ ID NO: 210 - protein, 418 aa, Artificial Sequence
  derived and/or modified protein sequence (wt) from Homo sapiens__ENST00000356595.8__PTGER3
MKETRGYGGDAPFCTRLNHSYTGMWAPERSAEARGNLTRPPGSGEDCGSVSVAFPITMLLTGFVGNALAMLLVSRSYRRRESKRKKSFLLCIGWLALTDLVGQLLTTPVVIVVYLSKQRWEHIDPSGRLCTFFGLTMTVFGLSSLFIASAMAVERALAIRAPHWYASHMKTRATRAVLLGVWLAVLAFALLPVLGVGQYTVQWPGTWCFISTGRGGNGTSSSHNWGNLFFASAFAFLGLLALTVTFSCNLATIKALVSRCRAKATASQSSAQWGRITTETAIQLMGIMCVLSVCWSPLLIMMLKMIFNQTSVEHCKTHTEKQKECNFFLIAVRLASLNQILDPWVYLLLRKILLRKFCQMRKRRLREQLICSLQNSQIQRATAHCGQVQTYRVLNREEMEVLVSSINVYTRISTVKTE

SEQ ID NO: 211 - protein, 412 aa, Artificial Sequence [sequence omitted]

SEQ ID NO: 212 - protein, 402 aa, Artificial Sequence
  derived and/or modified protein sequence (wt) from Homo sapiens__ENST00000361210.6__PTGER3
MKETRGYGGDAPFCTRLNHSYTGMWAPERSAEARGNLTRPPGSGEDCGSVSVAFPITMLLTGFVGNALAMLLVSRSYRRRESKRKKSFLLCIGWLALTDLVGQLLTTPVVIVVYLSKQRWEHIDPSGRLCTFFGLTMTVFGLSSLFIASAMAVERALAIRAPHWYASHMKTRATRAVLLGVWLAVLAFALLPVLGVGQYTVQWPGTWCFISTGRGGNGTSSSHNWGNLFFASAFAFLGLLALTVTFSCNLATIKALVSRCRAKATASQSSAQWGRITTETAIQLMGIMCVLSVCWSPLLIMMLKMIFNQTSVEHCKTHTEKQKECNFFLIAVRLASLNQILDPWVYLLLRKILLRKFCQMRKRRLREQEMGPDGRCFCHAWRQVPRTWCSSHDREPCSVQLS

SEQ ID NO: 213 - protein, 393 aa, Artificial Sequence
  derived and/or modified protein sequence (wt) from Homo sapiens__ENST00000479353.5__PTGER3
MKETRGYGGDAPFCTRLNHSYTGMWAPERSAEARGNLTRPPGSGEDCGSVSVAFPITMLLTGFVGNALAMLLVSRSYRRRESKRKKSFLLCIGWLALTDLVGQLLTTPVVIVVYLSKQRWEHIDPSGRLCTFFGLTMTVFGLSSLFIASAMAVERALAIRAPHWYASHMKTRATRAVLLGVWLAVLAFALLPVLGVGQYTVQWPGTWCFISTGRGGNGTSSSHNWGNLFFASAFAFLGLLALTVTFSCNLATIKALVSRCRAKATASQSSAQWGRITTETAIQLMGIMCVLSVCWSPLLIMMLKMIFNQTSVEHCKTHTEKQKECNFFLIAVRLASLNQILDPWVYLLLRKILLRKFCQEMGPDGRCFCHAWRQVPRTWCSSHDREPCSVQLS

SEQ ID NO: 214 - protein, 390 aa, Artificial Sequence
  derived and/or modified protein sequence (wt) from Homo sapiens__ENST00000370931.7__PTGER3
MKETRGYGGDAPFCTRLNHSYTGMWAPERSAEARGNLTRPPGSGEDCGSVSVAFPITMLLTGFVGNALAMLLVSRSYRRRESKRKKSFLLCIGWLALTDLVGQLLTTPVVIVVYLSKQRWEHIDPSGRLCTFFGLTMTVFGLSSLFIASAMAVERALAIRAPHWYASHMKTRATRAVLLGVWLAVLAFALLPVLGVGQYTVQWPGTWCFISTGRGGNGTSSSHNWGNLFFASAFAFLGLLALTVTFSCNLATIKALVSRCRAKATASQSSAQWGRITTETAIQLMGIMCVLSVCWSPLLIMMLKMIFNQTSVEHCKTHTEKQKECNFFLIAVRLASLNQILDPWVYLLLRKILLRKFCQIRYHTNNYASSSTSLPCQCSSTLMWSDHLER

SEQ ID NO: 215 - protein, 388 aa, Artificial Sequence
  derived and/or modified protein sequence (wt) from Homo sapiens__ENST00000370924.4__PTGER3
MKETRGYGGDAPFCTRLNHSYTGMWAPERSAEARGNLTRPPGSGEDCGSVSVAFPITMLLTGFVGNALAMLLVSRSYRRRESKRKKSFLLCIGWLALTDLVGQLLTTPVVIVVYLSKQRWEHIDPSGRLCTFFGLTMTVFGLSSLFIASAMAVERALAIRAPHWYASHMKTRATRAVLLGVWLAVLAFALLPVLGVGQYTVQWPGTWCFISTGRGGNGTSSSHNWGNLFFASAFAFLGLLALTVTFSCNLATIKALVSRCRAKATASQSSAQWGRITTETAIQLMGIMCVLSVCWSPLLIMMLKMIFNQTSVEHCKTHTEKQKECNFFLIAVRLASLNQILDPWVYLLLRKILLRKFCQVANAVSSCSNDGQKGQPISLSNEIIQTEA

SEQ ID NO: 216 - protein, 388 aa, Artificial Sequence
  derived and/or modified protein sequence (wt) from Homo sapiens__ENST00000370932.6__PTGER3
MKETRGYGGDAPFCTRLNHSYTGMWAPERSAEARGNLTRPPGSGEDCGSVSVAFPITMLLTGFVGNALAMLLVSRSYRRRESKRKKSFLLCIGWLALTDLVGQLLTTPVVIVVYLSKQRWEHIDPSGRLCTFFGLTMTVFGLSSLFIASAMAVERALAIRAPHWYASHMKTRATRAVLLGVWLAVLAFALLPVLGVGQYTVQWPGTWCFISTGRGGNGTSSSHNWGNLFFASAFAFLGLLALTVTFSCNLATIKALVSRCRAKATASQSSAQWGRITTETAIQLMGIMCVLSVCWSPLLIMMLKMIFNQTSVEHCKTHTEKQKECNFFLIAVRLASLNQILDPWVYLLLRKILLRKFCQVANAVSFSRRNFGEIKTCLSARITSLEAP

SEQ ID NO: 217 - protein, 374 aa, Artificial Sequence
  derived and/or modified protein sequence (wt) from Homo sapiens__ENST00000460330.5__PTGER3
MKETRGYGGDAPFCTRLNHSYTGMWAPERSAEARGNLTRPPGSGEDCGSVSVAFPITMLLTGFVGNALAMLLVSRSYRRRESKRKKSFLLCIGWLALTDLVGQLLTTPVVIVVYLSKQRWEHIDPSGRLCTFFGLTMTVFGLSSLFIASAMAVERALAIRAPHWYASHMKTRATRAVLLGVWLAVLAFALLPVLGVGQYTVQWPGTWCFISTGRGGNGTSSSHNWGNLFFASAFAFLGLLALTVTFSCNLATIKALVSRCRAKATASQSSAQWGRITTETAIQLMGIMCVLSVCWSPLLIMMLKMIFNQTSVEHCKTHTEKQKECNFFLIAVRLASLNQILDPWVYLLLRKILLRKFCQMRKRRLREQEEFWGN

SEQ ID NO: 218 - protein, 365 aa, Artificial Sequence
  derived and/or modified protein sequence (wt) from Homo sapiens__ENST00000628037.2__PTGER3
MKETRGYGGDAPFCTRLNHSYTGMWAPERSAEARGNLTRPPGSGEDCGSVSVAFPITMLLTGFVGNALAMLLVSRSYRRRESKRKKSFLLCIGWLALTDLVGQLLTTPVVIVVYLSKQRWEHIDPSGRLCTFFGLTMTVFGLSSLFIASAMAVERALAIRAPHWYASHMKTRATRAVLLGVWLAVLAFALLPVLGVGQYTVQWPGTWCFISTGRGGNGTSSSHNWGNLFFASAFAFLGLLALTVTFSCNLATIKALVSRCRAKATASQSSAQWGRITTETAIQLMGIMCVLSVCWSPLLIMMLKMIFNQTSVEHCKTHTEKQKECNFFLIAVRLASLNQILDPWVYLLLRKILLRKFCQEEFWGN

SEQ ID NO: 219 - protein, 488 aa, Artificial Sequence
  derived and/or modified protein sequence (wt) from Homo sapiens__ENST00000302472.3__PTGER4
MSTPGVNSSASLSPDRLNSPVTIPAVMFIFGVVGNLVAIVVLCKSRKEQKETTFYTLVCGLAVTDLLGTLLVSPVTIATYMKGQWPGGQPLCEYSTFILLFFSLSGLSIICAMSVERYLAINHAYFYSHYVDKRLAGLTLFAVYASNVLFCALPNMGLGSSRLQYPDTWCFIDWTTNVTAHAAYSYMYAGFSSFLILATVLCNVLVCGALLRMHRQFMRRTSLGTEQHHAAAAASVASRGHPAASPALPRLSDFRRRRSFRRIAGAEIQMVILLIATSLVVLICSIPLVVRVFVNQLYQPSLEREVSKNPDLQAIRIASVNPILDPWIYILLRKTVLSKAIEKIKCLFCRIGGSRRERSGQHCSDSQRTSSAMSGHSRSFISRELKEISSTSQTLLPDLSLPDLSENGLGGRNLLPGVPGMGLAQEDTTSLRTLRISETSDSSQGQDSESVLLVDEAGGSGRAGPAPKGSSLQVTFPSETLNLSEKCI

SEQ ID NO: 220 - protein, 359 aa, Artificial Sequence
  derived and/or modified protein sequence (wt) from Homo sapiens__ENST00000370757.7__PTGFR
MSMNNSKQLVSPAAALLSNTTCQTENRLSVFFSVIFMTVGILSNSLAIAILMKAYQRFRQKSKASFLLLASGLVITDFFGHLINGAIAVFVYASDKEWIRFDQSNVLCSIFGICMVFSGLCPLLLGSVMAIERCIGVTKPIFHSTKITSKHVKMMLSGVCLFAVFIALLPILGHRDYKIQASRTWCFYNTEDIKDWEDRFYLLLFSFLGLLALGVSLLCNAITGITLLRVKFKSQQHRQGRSHHLEMVIQLLAIMCVSCICWSPFLVTMANIGINGNHSLETCETTLFALRMATWNQILDPWVYILLRKAVLKNLYKLASQCCGVHVISLHIWELSSIKNSLKVAAISESPVAEKSAST

SEQ ID NO: 221 - protein, 297 aa, Artificial Sequence
  derived and/or modified protein sequence (wt) from Homo sapiens__ENST00000370756.3__PTGFR
MSMNNSKQLVSPAAALLSNTTCQTENRLSVFFSVIFMTVGILSNSLAIAILMKAYQRFRQKSKASFLLLASGLVITDFFGHLINGAIAVFVYASDKEWIRFDQSNVLCSIFGICMVFSGLCPLLLGSVMAIERCIGVTKPIFHSTKITSKHVKMMLSGVCLFAVFIALLPILGHRDYKIQASRTWCFYNTEDIKDWEDRFYLLLFSFLGLLALGVSLLCNAITGITLLRVKFKSQQHRQGRSHHLEMVIQLLAIMCVSCICWSPFLGYRIILNGKEKYKVYEEQSDFLHRLQWPTLE

SEQ ID NO: 222 - protein, 297 aa, Artificial Sequence
  derived and/or modified protein sequence (wt) from Homo sapiens__ENST00000497923.5__PTGFR
MSMNNSKQLVSPAAALLSNTTCQTENRLSVFFSVIFMTVGILSNSLAIAILMKAYQRFRQKSKASFLLLASGLVITDFFGHLINGAIAVFVYASDKEWIRFDQSNVLCSIFGICMVFSGLCPLLLGSVMAIERCIGVTKPIFHSTKITSKHVKMMLSGVCLFAVFIALLPILGHRDYKIQASRTWCFYNTEDIKDWEDRFYLLLFSFLGLLALGVSLLCNAITGITLLRVKFKSQQHRQGRSHHLEMVIQLLAIMCVSCICWSPFLGYRIILNGKEKYKVYEEQSDFLHSDKTLNEK

SEQ ID NO: 223 - protein, 386 aa, Artificial Sequence [sequence omitted]

SEQ ID NO: 224 - protein, 296 aa, Artificial Sequence
  derived and/or modified protein sequence (wt) from Homo sapiens__ENST00000596260.1__PTGIR
MADSCRNLTYVRGSVGPATSTLMFVAGVVGNGLALGILSARRPARPSAFAVLVTGLAATDLLGTSFLSPAVFVAYARNSSLLGLARGGPALCDAFAFAMTFFGLASMLILFAMAVERCLALSHPYLYAQLDGPRCARLALPAIYAFCVLFCALPLLGLGQHQQYCPGSWCFLRMRWAQPGGAAFSLAYAGLVALLVAAIFLCNGSVTLSLCRMYRQQKRHQGSLGPRPRTGEDEVDHLILLALMTVVMAVCSLPLTHVERPRQDRMRWLTPVIPALWEAEAGGSFEVRSSRPVWPT

SEQ ID NO: 225 - protein, 174 aa, Artificial Sequence
  derived and/or modified protein sequence (wt) from Homo sapiens__ENST00000598865.5__PTGIR
MYRQQKRHQGSLGPRPRTGEDEVDHLILLALMTVVMAVCSLPLTIRCFTQAVAPDSSSEMGDLLAFRFYAFNPILDPWVFILFRKAVFQRLKLWVCCLCLGPAHGDSQTPLSQLASGRRDPRAPSAPVGKEGSCVPLSAWGEGQVEPLPPTQQSSGSAVGTSSKAEASVACSLC

SEQ ID NO: 226 - protein, 143 aa, Artificial Sequence
  derived and/or modified protein sequence (wt) from Homo sapiens__ENST00000594275.1__PTGIR
MTVVMAVCSLPLTIRCFTQAVAPDSSSEMGDLLAFRFYAFNPILDPWVFILFRKAVFQRLKLWVCCLCLGPAHGDSQTPLSQLASGRRDPRAPSAPVGKEGSCVPLSAWGEGQVEPLPPTQQSSGSAVGTSSKAEASVACSLC

SEQ ID NO: 227 - protein, 115 aa, Artificial Sequence
  derived and/or modified protein sequence (wt) from Homo sapiens__ENST00000597185.1__PTGIR
MGDLLAFRFYAFNPILDPWVFILFRKAVFQRLKLWVCCLCLGPAHGDSQTPLSQLASGRRDPRAPSAPVGKEGSCVPLSAWGEGQVEPLPPTQQSSGSAVGTSSKAEASVACSLC

SEQ ID NO: 228 - protein, 348 aa, Artificial Sequence [sequence omitted]

SEQ ID NO: 229 - protein, 317 aa, Artificial Sequence
  derived and/or modified protein sequence (wt) from Homo sapiens__ENST00000268125.9__RLBP1
MSEGVGTFRMVPEEEQELRAQLEQLTTKDHGPVFGPCSQLPRHTLQKAKDELNEREETREEAVRELQEMVQAQAASGEELAVAVAERVQEKDSGFFLRFIRARKFNVGRAYELLRGYVNFRLQYPELFDSLSPEAVRCTIEAGYPGVLSSRDKYGRVVMLFNIENWQSQEITFDEILQAYCFILEKLLENEETQINGFCIIENFKGFTMQQAASLRTSDLRKMVDMLQDSFPARFKAIHFIHQPWYFTTTYNVVKPFLKSKLLERVFVHGDDLSGFYQEIDENILPSDFGGTLPKYDGKAVAEQLFGPQAQAENTAF

SEQ ID NO: 230 - protein, 71 aa, Artificial Sequence
  derived and/or modified protein sequence (wt) from Homo sapiens__ENST00000567787.1__RLBP1
MSEGVGTFRMVPEEEQELRAQLEQLTTKDHGPVFGPCSQLPRHTLQKAKDELNEREETREEPVPRGCPLHH

SEQ ID NO: 231 - protein, 1354 aa, Artificial Sequence
  derived and/or modified protein sequence (wt) from Homo sapiens__ENST00000399799.2__ROCK1
MSTGDSFETRFEKMDNLLRDPKSEVNSDCLLDGLDALVYDLDFPALRKNKNIDNFLSRYKDTINKIRDLRMKAEDYEVVKVIGRGAFGEVQLVRHKSTRKVYAMKLLSKFEMIKRSDSAFFWEERDIMAFANSPWVVQLFYAFQDDRYLYMVMEYMPGGDLVNLMSNYDVPEKWARFYTAEVVLALDAIHSMGFIHRDVKPDNMLLDKSGHLKLADFGTCMKMNKEGMVRCDTAVGTPDYISPEVLKSQGGDGYYGRECDWWSVGVFLYEMLVGDTPFYADSLVGTYSKIMNHKNSLTFPDDNDISKEAKNLICAFLTDREVRLGRNGVEEIKRHLFFKNDQWAWETLRDTVAPVVPDLSSDIDTSNFDDLEEDKGEEETFPIPKAFVGNQLPFVGFTYYSNRRYLSSANPNDNRTSSNADKSLQESLQKTIYKLEEQLHNEMQLKDEMEQKCRTSNIKLDKIMKELDEEGNQRRNLESTVSQIEKEKMLLQHRINEYQRKAEQENEKRRNVENEVSTLKDQLEDLKKVSQNSQLANEKLSQLQKQLEEANDLLRTESDTAVRLRKSHTEMSKSISQLESLNRELQERNRILENSKSQTDKDYYQLQAILEAERRDRGHDSEMIGDLQARITSLQEEVKHLKHNLEKVEGERKEAQDMLNHSEKEKNNLEIDLNYKLKSLQQRLEQEVNEHKVTKARLTDKHQSIEEAKSVAMCEMEKKLKEEREAREKAENRVVQIEKQCSMLDVDLKQSQQKLEHLTGNKERMEDEVKNLTLQLEQESNKRLLLQNELKTQAFEADNLKGLEKQMKQEINTLLEAKRLLEFELAQLTKQYRGNEGQMRELQDQLEAEQYFSTLYKTQVKELKEEIEEKNRENLKKIQELQNEKETLATQLDLAETKAESEQLARGLLEEQYFELTQESKKAASRNRQEITDKDHTVSRLEEANSMLTKDIEILRRENEELTEKMKKAEEEYKLEKEEEISNLKAAFEKNINTERTLKTQAVNKLAEIMNRKDFKIDRKKANTQDLRKKEKENRKLQLELNQEREKFNQMVVKHQKELNDMQAQLVEECAHRNELQMQLASKESDIEQLRAKLLDLSDSTSVASFPSADETDGNLPESRIEGWLSVPNRGNIKRYGWKKQYVVVSSKKILFYNDEQDKEQSNPSMVLDIDKLFHVRPVTQGDVYRAETEEIPKIFQILYANEGECRKDVEMEPVQQAEKTNFQNHKGHEFIPTLYHFPANCDACAKPLWHVFKPPPALECRRCHVKCHRDHLDKKEDLICPCKVSYDVTSARDMLLLACSQDEQKKWVTHLVKKIPKNPPSGFVRASPRTLSTRSTANQSFRKVVKNTSGKTS

SEQ ID NO: 232 - protein, 1137 aa, Artificial Sequence
  derived and/or modified protein sequence (wt) from Homo sapiens__ENST00000635540.1__ROCK1
MSTGDSFETRFEKMDNLLRDPKSEVNSDCLLDGLDALVYDLDFPALRKNKNIDNFLSRYKDTINKIRDLRMKAEDYEVVKVIGRGAFGEVQLVRHKSTRKVYAMKLLSKFEMIKRSDSAFFWEERDIMAFANSPWVVQLFYAFQDDRYLYMVMEYMPGGDLVNLMSNYDVPEKWARFYTAEVVLALDAIHSMGFIHRDVKPDNMLLDKSGHLKLADFGTCMKMNKEGMVRCDTAVGTPDYISPEVLKSQGGDGYYGRECDWWSVGVFLYEMLVGDTPFYADSLVGTYSKIMNHKNSLTFPDDNDISKEAKNLICAFLTDREVRLGRNGVEEIKRHLFFKNDQWAWETLRDTVAPVVPDLSSDIDTSNFDDLEEDKGEEETFPIPKAFVGNQLPFVGFTYYSNRRYLSSANPNDNRTSSNADKSLQESLQKTIYKLEEQLHNEMQLKDEMEQKCRTSNIKLDKIMKELDEEGNQRRNLESTVSQIEKEKMLLQHRINEYQRKAEQENEKRRNVENEVSTLKDQLEDLKKVSQNSQLANEKLSQLQKQLEEANDLLRTESDTAVRLRKSHTEMSKSISQLESLNRELQERNRILENSKSQTDKDYYQLQAILEAERRDRGHDSEMIGDLQARITSLQEEVKHLKHNLEKVEGERKEAQDMLNHSEKEKNNLEIDLNYKLKSLQQRLEQEVNEHKVTKARLTDKHQSIEEAKSVAMCEMEKKLKEEREAREKAENRVVQIEKQCSMLDVDLKQSQQKLEHLTGNKERMEDEVKNLTLQLEQESNKRLLLQNELKTQAFEADNLKGLEKQMKQEINTLLEAKRLLEFELAQLTKQYRGNEGQMRELQDQLEAEQYFSTLYKTQVKELKEEIEEKNRENLKKIQELQNEKETLATQLDLAETKAESEQLARGLLEEQYFELTQESKKAASRNRQEITDKDHTVSRLEEANSMLTKDIEILRRENEELTEKMKKAEEEYKLEKEEEISNLKAAFEKNINTERTLKTQAVNKLAEIMNRKDFKIDRKKANTQDLRKKEKENRKLQLELNQEREKFNQMVVKHQKELNDMQAQLVEECAHRNELQMQLASKESDIEQLRAKLLDLSDSTSVASFPSADETDGNLPVDSACIPYLFIFYSCLLVKN

SEQ ID NO: 233 - protein, 1388 aa, Artificial Sequence
  derived and/or modified protein sequence (wt) from Homo sapiens__ENST00000315872.10__ROCK2
MSRPPPTGKMPGAPETAPGDGAGASRQRKLEALIRDPRSPINVESLLDGLNSLVLDLDFPALRKNKNIDNFLNRYEKIVKKIRGLQMKAEDYDVVKVIGRGAFGEVQLVRHKASQKVYAMKLLSKFEMIKRSDSAFFWEERDIMAFANSPWVVQLFYAFQDDRYLYMVMEYMPGGDLVNLMSNYDVPEKWAKFYTAEVVLALDAIHSMGLIHRDVKPDNMLLDKHGHLKLADFGTCMKMDETGMVHCDTAVGTPDYISPEVLKSQGGDGFYGRECDWWSVGVFLYEMLVGDTPFYADSLVGTYSKIMDHKNSLCFPEDAEISKHAKNLICAFLTDREVRLGRNGVEEIRQHPFFKNDQWHWDNIRETAAPVVPELSSDIDSSNFDDIEDDKGDVETFPIPKAFVGNQLPFIGFTYYRENLLLSDSPSCRETDSIQSRKNEESQEIQKKLYTLEEHLSNEMQAKEELEQKCKSVNTRLEKTAKELEEEITLRKSVESALRQLEREKALLQHKNAEYQRKADHEADKKRNLENDVNSLKDQLEDLKKRNQNSQISTEKVNQLQRQLDETNALLRTESDTAARLRKTQAESSKQIQQLESNNRDLQDKNCLLETAKLKLEKEFINLQSALESERRDRTHGSEIINDLQGRICGLEEDLKNGKILLAKVELEKRQLQERFTDLEKEKSNMEIDMTYQLKVIQQSLEQEEAEHKATKARLADKNKIYESIEEAKSEAMKEMEKKLLEERTLKQKVENLLLEAEKRCSLLDCDLKQSQQKINELLKQKDVLNEDVRNLTLKIEQETQKRCLTQNDLKMQTQQVNTLKMSEKQLKQENNHLMEMKMNLEKQNAELRKERQDADGQMKELQDQLEAEQYFSTLYKTQVRELKEECEEKTKLGKELQQKKQELQDERDSLAAQLEITLTKADSEQLARSIAEEQYSDLEKEKIMKELEIKEMMARHKQELTEKDATIASLEETNRTLTSDVANLANEKEELNNKLKDVQEQLSRLKDEEISAAAIKAQFEKQLLTERTLKTQAVNKLAEIMNRKEPVKRGNDTDVRRKEKENRKLHMELKSEREKLTQQMIKYQKELNEMQAQIAEESQIRIELQMTLDSKDSDIEQLRSQLQALHIGLDSSSIGSGPGDAEADDGFPESRLEGWLSLPVRNNTKKFGWVKKYVIVSSKKILFYDSEQDKEQSNPYMVLDIDKLFHVRPVTQTDVYRADAKEIPRIFQILYANEGESKKEQEFPVEPVGEKSNYICHKGHEFIPTLYHFPTNCEACMKPLWHMFKPPPALECRRCHIKCHKDHMDKKEEIIAPCKVYYDISTAKNLLLLANSTEEQQKWVSRLVKKIPKKPPAPDPFARSSPRTSMKIQQNQSIRRPSRQLAPNKPS

SEQ ID NO: 234 - protein, 1145 aa, Artificial Sequence
  derived and/or modified protein sequence (wt) from Homo sapiens__ENST00000401753.5__ROCK2
MVHCDTAVGTPDYISPEVLKSQGGDGFYGRECDWWSVGVFLYEMLVGDTPFYADSLVGTYSKIMDHKNSLCFPEDAEISKHAKNLICAFLTDREVRLGRNGVEEIRQHPFFKNDQWHWDNIRETAAPVVPELSSDIDSSNFDDIEDDKGDVETFPIPKAFVGNQLPFIGFTYYRENLLLSDSPSCRETDSIQSRKNEESQEIQKKLYTLEEHLSNEMQAKEELEQKCKSVNTRLEKTAKELEEEITLRKSVESALRQLEREKALLQHKNAEYQRKADHEADKKRNLENDVNSLKDQLEDLKKRNQNSQISTEKVNQLQRQLDETNALLRTESDTAARLRKTQAESSKQIQQLESNNRDLQDKNCLLETAKLKLEKEFINLQSALESERRDRTHGSEIINDLQGRICGLEEDLKNGKILLAKVELEKRQLQERFTDLEKEKSNMEIDMTYQLKVIQQSLEQEEAEHKATKARLADKNKIYESIEEAKSEAMKEMEKKLLEERTLKQKVENLLLEAEKRCSLLDCDLKQSQQKINELLKQKDVLNEDVRNLTLKIEQETQKRCLTQNDLKMQTQQVNTLKMSEKQLKQENNHLMEMKMNLEKQNAELRKERQDADGQMKELQDQLEAEQYFSTLYKTQVRELKEECEEKTKLGKELQQKKQELQDERDSLAAQLEITLTKADSEQLARSIAEEQYSDLEKEKIMKELEIKEMMARHKQELTEKDATIASLEETNRTLTSDVANLANEKEELNNKLKDVQEQLSRLKDEEISAAAIKAQFEKQLLTERTLKTQAVNKLAEIMNRKEPVKRGNDTDVRRKEKENRKLHMELKSEREKLTQQMIKYQKELNEMQAQIAEESQIRIELQMTLDSKDSDIEQLRSQLQALHIGLDSSSIGSGPGDAEADDGFPESRLEGWLSLPVRNNTKKFGWVKKYVIVSSKKILFYDSEQDKEQSNPYMVLDIDKLFHVRPVTQTDVYRADAKEIPRIFQILYANEGESKKEQEFPVEPVGEKSNYICHKGHEFIPTLYHFPTNCEACMKPLWHMFKPPPALECRRCHIKCHKDHMDKKEEIIAPCKVYYDISTAKNLLLLANSTEEQQKWVSRLVKKIPKKPPAPDPFARSSPRTSMKIQQNQSIRRPSRQLAPNKPS

SEQ ID NO: 235 - protein, 703 aa, Artificial Sequence
  derived and/or modified protein sequence (wt) from Homo sapiens__ENST00000616279.4__ROCK2
MEIDMTYQLKVIQQSLEQEEAEHKATKARLADKNKIYESIEEAKSEAMKEMEKKLLEERTLKQKVENLLLEAEKRCSLLDCDLKQSQQKINELLKQKDVLNEDVRNLTLKIEQETQKRCLTQNDLKMQTQQVNTLKMSEKQLKQENNHLMEMKMNLEKQNAELRKERQDADGQMKELQDQLEAEQYFSTLYKTQVRELKEECEEKTKLGKELQQKKQELQDERDSLAAQLEITLTKADSEQLARSIAEEQYSDLEKEKIMKELEIKEMMARHKQELTEKDATIASLEETNRTLTSDVANLANEKEELNNKLKDVQEQLSRLKDEEISAAAIKAQFEKQLLTERTLKTQAVNKLAEIMNRKEPVKRGNDTDVRRKEKENRKLHMELKSEREKLTQQMIKYQKELNEMQAQIAEESQIRIELQMTLDSKDSDIEQLRSQLQALHIGLDSSSIGSGPGDAEADDGFPESRLEGWLSLPVRNNTKKFGWVKKYVIVSSKKILFYDSEQDKEQSNPYMVLDIDKLFHVRPVTQTDVYRADAKEIPRIFQILYANEGESKKEQEFPVEPVGEKSNYICHKGHEFIPTLYHFPTNCEACMKPLWHMFKPPPALECRRCHIKCHKDHMDKKEEIIAPCKVYYDISTAKNLLLLANSTEEQQKWVSRLVKKIPKKPPAPDPFARSSPRTSMKIQQNQSIRRPSRQLAPNKPS

SEQ ID NO: 236 - protein, 446 aa, Artificial Sequence
  derived and/or modified protein sequence (wt) from Homo sapiens__ENST00000261535.7__ROCK2
MSRPPPTGKMPGAPETAPGDGAGASRQRKLEALIRDPRSPINVESLLDGLNSLVLDLDFPALRKNKNIDNFLNRYEKIVKKIRGLQMKAEDYDVVKVIGRGAFGEVQLVRHKASQKVYAMKLLSKFEMIKRSDSAFFWEERDIMAFANSPWVVQLFYAFQDDRYLYMVMEYMPGGDLVNLMSNYDVPEKWAKFYTAEVVLALDAIHSMGLIHRDVKPDNMLLDKHGHLKLADFGTCMKMDETGMVHCDTAVGTPDYISPEVLKSQGGDGFYGRECDWWSVGVFLYEMLVGDTPFYADSLVGTYSKIMDHKNSLCFPEDAEISKHAKNLICAFLTDREVRLGRNGVEEIRQHPFFKNDQWHWDNIRETAAPVVPELSSDIDSSNFDDIEDDKGDVETFPIPKAFVGNQLPFIGFTYYRENLLLSDSPSCRETDSIQSRKNEESQEVC

SEQ ID NO: 237 - protein, 533 aa, Artificial Sequence
  derived and/or modified protein sequence (wt) from Homo sapiens__ENST00000262340.5__RPE65
MSIQVEHPAGGYKKLFETVEELSSPLTAHVTGRIPLWLTGSLLRCGPGLFEVGSEPFYHLFDGQALLHKFDFKEGHVTYHRRFIRTDAYVRAMTEKRIVITEFGTCAFPDPCKNIFSRFFSYFRGVEVTDNALVNVYPVGEDYYACTETNFITKINPETLETIKQVDLCNYVSVNGATAHPHIENDGTVYNIGNCFGKNFSIAYNIVKIPPLQADKEDPISKSEIVVQFPCSDRFKPSYVHSFGLTPNYIVFVETPVKINLFKFLSSWSLWGANYMDCFESNETMGVWLHIADKKRKKYLNNKYRTSPFNLFHHINTYEDNGFLIVDLCCWKGFEFVYNYLYLANLRENWEEVKKNARKAPQPEVRRYVLPLNIDKADTGKNLVTLPNTTATAILCSDETIWLEPEVLFSGPRQAFEFPQINYQKYCGKPYTYAYGLGLNHFVPDRLCKLNVKTKETWVWQEPDSYPSEPIFVSHPDALEEDDGVVLSVVVSPGAGQKPAYLLILNAKDLSEVARAEVEINIPVTFHGLFKKS

SEQ ID NO: 238 - protein, 1152 aa, Artificial Sequence
  derived and/or modified protein sequence (wt) from Homo sapiens__ENST00000378505.7__RPGR
MREPEELMPDSGAVFTFGKSKFAENNPGKFWFKNDVPVHLSCGDEHSAVVTGNNKLYMFGSNNWGQLGLGSKSAISKPTCVKALKPEKVKLAACGRNHTLVSTEGGNVYATGGNNEGQLGLGDTEERNTFHVISFFTSEHKIKQLSAGSNTSAALTEDGRLFMWGDNSEGQIGLKNVSNVCVPQQVTIGKPVSWISCGYYHSAFVTTDGELYVFGEPENGKLGLPNQLLGNHRTPQLVSEIPEKVIQVACGGEHTVVLTENAVYTFGLGQFGQLGLGTFLFETSEPKVIENIRDQTISYISCGENHTALITDIGLMYTFGDGRHGKLGLGLENFTNHFIPTLCSNFLRFIVKLVACGGCHMVVFAAPHRGVAKEIEFDEINDTCLSVATFLPYSSLTSGNVLQRTLSARMRRRERERSPDSFSMRRTLPPIEGTLGLSACFLPNSVFPRCSERNLQESVLSEQDLMQPEEPDYLLDEMTKEAEIDNSSTVESLGETTDILNMTHIMSLNSNEKSLKLSPVQKQKKQQTIGELTQDTALTENDDSDEYEEMSEMKEGKACKQHVSQGIFMTQPATTIEAFSDEEVEIPEEKEGAEDSKGNGIEEQEVEANEENVKVHGGRKEKTEILSDDLTDKAEVSEGKAKSVGEAEDGPEGRGDGTCEEGSSGAEHWQDEEREKGEKDKGRGEMERPGEGEKELAEKEEWKKRDGEEQEQKEREQGHQKERNQEMEEGGEEEHGEGEEEEGDREEEEEKEGEGKEEGEGEEVEGEREKEEGERKKEERAGKEEKGEEEGDQGEGEEEETEGRGEEKEEGGEVEGGEVEEGKGEREEEEEEGEGEEEEGEGEEEEGEGEEEEGEGKGEEEGEEGEGEEEGEEGEGEGEEEEGEGEGEEEGEGEGEEEEGEGEGEEEGEGEGEEEEGEGKGEEEGEEGEGEGEEEEGEGEGEDGEGEGEEEEGEWEGEEEEGEGEGEEEGEGEGEEGEGEGEEEEGEGEGEEEEGEEEGEEEGEGEEEGEGEGEEEEEGEVEGEVEGEEGEGEGEEEEGEEEGEEREKEGEGEENRRNREEEEEEEGKYQETGEEENERQDGEEYKKVSKIKGSVKYGKHKTYQKKSVTNTQGNGKEQRSKMPVQSKRLLKNGPSGSKKFWNNVLPHYLELK

SEQ ID NO: 239 - protein, 1020 aa, Artificial Sequence
  derived and/or modified protein sequence (wt) from Homo sapiens__ENST00000339363.7__RPGR
MREPEELMPDSGAVFTFGKSKFAENNPGKFWFKNDVPVHLSCGDEHSAVVTGNNKLYMFGSNNWGQLGLGSKSAISKPTCVKALKPEKVKLAACGRNHTLVSTEGGNVYATGGNNEGQLGLGDTEERNTFHVISFFTSEHKIKQLSAGSNTSAALTEDGRLFMWGDNSEGQIGLKNVSNVCVPQQVTIGKPVSWISCGYYHSAFVTTDGELYVFGEPENGKLGLPNQLLGNHRTPQLVSEIPEKVIQVACGGEHTVVLTENAVYTFGLGQFGQLGLGTFLFETSEPKVIENIRDQTISYISCGENHTALITDIGLMYTFGDGRHGKLGLGLENFTNHFIPTLCSNFLRFIVKLVACGGCHMVVFAAPHRGVAKEIEFDEINDTCLSVATFLPYSSLTSGNVLQRTLSARMRRRERERSPDSFSMRRTLPPIEGTLGLSACFLPNSVFPRCSERNLQESVLSEQDLMQPEEPDYLLDEMTKEAEIDNSSTVESLGETTDILNMTHIMSLNSNEKSLKLSPVQKQKKQQTIGELTQDTALTENDDSDEYEEMSEMKEGKACKQHVSQGIFMTQPATTIEAFSDEEVGNDTGQVGPQADTDGEGLQKEVYRHENNNGVDQLDAKEIEKESDGGHSQKESEAEEIDSEKETKLAEIAGMKDLREREKSTKKMSPFFGNLPDRGMNTESEENKDFVKKRESCKQDVIFDSERESVEKPDSYMEGASESQQGIADGFQQPEAIEFSSGEKEDDEVETDQNIRYGRKLIEQGNEKETKPIISKSMAKYDFKCDRLSEIPEEKEGAEDSKGNGIEEQEVEANEENVKVHGGRKEKTEILSDDLTDKAEDHEFSKTEELKLEDVDEEINAENVESKKKTVGDDESVPTGYHSKTEGAERTNDDSSAETIEKKEKANLEERAICEYNENPKGYMLDDADSSSLEILENSETTPSKDMKKTKKIFLFKRVPSINQKIVKNNNEPLPEIKSIGDQIILKSDNKDADQNHMSQNHQNIPPTNTERRSKSCTIL

SEQ ID NO: 240 - protein, 815 aa, Artificial Sequence
  derived and/or modified protein sequence (wt) from Homo sapiens__ENST00000642395.1__RPGR
MREPEELMPDSGAVFTFGKSKFAENNPGKFWFKNDVPVHLSCGDEHSAVVTGNNKLYMFGSNNWGQLGLGSKSAISKPTCVKALKPEKVKLAACGRNHTLVSTEGGNVYATGGNNEGQLGLGDTEERNTFHVISFFTSEHKIKQLSAGSNTSAALTEDGRLFMWGDNSEGQIGLKNVSNVCVPQQVTIGKPVSWISCGYYHSAFVTTDGELYVFGEPENGKLGLPNQLLGNHRTPQLVSEIPEKVIQVACGGEHTVVLTENAVYTFGLGQFGQLGLGTFLFETSEPKVIENIRDQTISYISCGENHTALITDIGLMYTFGDGRHGKLGLGLENFTNHFIPTLCSNFLRFIVKLVACGGCHMVVFAAPHRGVAKEIEFDEINDTCLSVATFLPYSSLTSGNVLQRTLSARMRRRERERSPDSFSMRRTLPPIEGTLGLSACFLPNSVFPRCSERNLQESVLSEQDLMQPEEPDYLLDEMTKEAEIDNSSTVESLGETTDILNMTHIMSLNSNEKSLKLSPVQKQKKQQTIGELTQDTALTENDDSDEYEEMSEMKEGKACKQHVSQGIFMTQPATTIEAFSDEEVEIPEEKEGAEDSKGNGIEEQEVEANEENVKVHGGRKEKTEILSDDLTDKAEDHEFSKTEELKLEDVDEEINAENVESKKKTVGDDESVPTGYHSKTEGAERTNDDSSAETIEKKEKANLEERAICEYNENPKGYMLDDADSSSLEILENSETTPSKDMKKTKKIFLFKRVPSINQKIVKNNNEPLPEIKSIGDQIILKSDNKDADQNHMSQNHQNIPPTNTERRSKSCTIL

SEQ ID NO: 241 - protein, 753 aa, Artificial Sequence
  derived and/or modified protein sequence (wt) from Homo sapiens__ENST00000644337.1__RPGR
MREPEELMPDSGAVFTFGKSKFAENNPGKFWFKNDVPVHLSCGDEHSAVVTGNNKLYMFGSNNWGQLGLGSKSAISKPTCVKALKPEKVKLAACGRNHTLVSTEGGNVYATGGNNEGQLGLGDTEERNTFHVISFFTSEHKIKQLSAGSNTSAALTEDGRLFMWGDNSEGQIGLKNVSNVCVPQQVTIGKPVSWISCGYYHSAFVTTDGELYVFGEPENGKLGLPNQLLGNHRTPQLVSEIPEKVIQVACGGEHTVVLTENAVYTFGLGQFGQLGLGTFLFETSEPKVIENIRDQTISYISCGENHTALITDIGLMYTFGDGRHGKLGLGLENFTNHFIPTLCSNFLRFIVKLERSPDSFSMRRTLPPIEGTLGLSACFLPNSVFPRCSERNLQESVLSEQDLMQPEEPDYLLDEMTKEAEIDNSSTVESLGETTDILNMTHIMSLNSNEKSLKLSPVQKQKKQQTIGELTQDTALTENDDSDEYEEMSEMKEGKACKQHVSQGIFMTQPATTIEAFSDEEVEIPEEKEGAEDSKGNGIEEQEVEANEENVKVHGGRKEKTEILSDDLTDKAEDHEFSKTEELKLEDVDEEINAENVESKKKTVGDDESVPTGYHSKTEGAERTNDDSSAETIEKKEKANLEERAICEYNENPKGYMLDDADSSSLEILENSETTPSKDMKKTKKIFLFKRVPSINQKIVKNNNEPLPEIKSIGDQIILKSDNKDADQNHMSQNHQNIPPTNTERRSKSCTIL

SEQ ID NO: 242 - protein, 673 aa, Artificial Sequence
  derived and/or modified protein sequence (wt) from Homo sapiens__ENST00000642739.1__RPGR
MREPEELMPDSGAVFTFGKSKFAENNPGKFWFKNDVPVHLSCGDEHSAVVTGNNKLYMFGSNNWGQLGLGSKSAISKPTCVKALKPEKVKLAACGRNHTLVSTEGGNVYATGGNNEGQLGLGDTEERNTFHVISFFTSEHKIKQLSAGSNTSAALTEDGRLFMWGDNSEGQIGLKNVSNVCVPQQVTIGKPVSWISCGYYHSAFVTTDGELYVFGEPENGKLGLPNQLLGNHRTPQLVSEIPEKVIQVACGGEHTVVLTENAVYTFGLGQFGQLGLGTFLFETSEPKVIENIRDQTISYISCGENHTALITDIGLMYTFGDGRHGKLGLGLENFTNHFIPTLCSNFLRFIVKLVACGGCHMVVFAAPHRGVAKEIEFDEINDTCLSVATFLPYSSLTSGNVLQRTLSARMRRRERERSPDSFSMRRTLPPIEGTLGLSACFLPNSVFPRCSERNLQESVLSEQDLMQPEEPDYLLDEMTKEAEIDNSSTVESLGETTDILNMTHIMSLNSNEKSLKLSPVQKQKDHEFSKTEELKLEDVDEEINAENVESKKKTVGDDESVPTGYHSKTEGAERTNDDSSAETIEKKEKANLEERAICEYNENPKGYMLDDADSSSLEILENSETTPSKDMKKTKKMEFRSCCPGWSAMARSWLTTILPPRFKRFSCLSLPSS

SEQ ID NO: 243 - protein, 646 aa, Artificial Sequence
  derived and/or modified protein sequence (wt) from Homo sapiens__ENST00000482855.5__RPGR
MREPEELMPDSGAVFTFGKSKFAENNPGKFWFKNDVPVHLSCGDEHSAVVTGNNKLYMFGSNNWGQLGLGSKSAISKPTCVKALKPEKVKLAACGRNHTLVSTEGGNVYATGGNNEGQLGLGDTEERNTFHVISFFTSEHKIKQLSAGSNTSAALTEDGRLFMWGDNSEGQIGLKNVSNVCVPQQVTIGKPVSWISCGYYHSAFVTTDGELYVFGEPENGKLGLPNQLLGNHRTPQLVSEIPEKVIQVACGGEHTVVLTENAVYTFGLGQFGQLGLGTFLFETSEPKVIENIRDQTISYISCGENHTALITDIGLMYTFGDGRHGKLGLGLENFTNHFIPTLCSNFLRFIVKLVACGGCHMVVFAAPHRGVAKEIEFDEINDTCLSVATFLPYSSLTSGNVLQRTLSARMRRRERERSPDSFSMRRTLPPIEGTLGLSACFLPNSVFPRCSERNLQESVLSEQDLMQPEEPDYLLDEMTKEAEIDNSSTVESLGETTDILNMTHIMSLNSNEKSLKLSPVQKQKKQQTIGELTQDTALTENDDSDEYEEMSEMKEGKACKQHVSQGIFMTQPATTIEAFSDEEVEIPEEKEGAEDSKGNGIEEQEVEANEENVKVHGGRKEKTEILSDDLTDKAEYSASHSQIVSV

SEQ ID NO: 244 - protein, 642 aa, Artificial Sequence
  derived and/or modified protein sequence (wt) from Homo sapiens__ENST00000644238.1__RPGR
MREPEELMPDSGAVFTFGKSKFAENNPGKFWFKNDVPVHLSCGDEHSAVVTGNNKLYMFGSNNWGQLGLGSKSAISKPTCVKALKPEKVKLAACGRNHTLVSTEGGNVYATGGNNEGQLGLGDTEERNTFHVISFFTSEHKIKQLSAGSNTSAALTEDGRLFMWGDNSEGQIGLKNVSNVCVPQQVTIGKPVSWISCGYYHSAFVTTDGELYVFGEPENGKLGLPNQLLGNHRTPQLVSEIPEKVIQVACGGEHTVVLTENAVYTFGLGQFGQLGLGTFLFETSEPKVIENIRDQTISYISCGENHTALITDIGLMYTFGDGRHGKLGLGLENFTNHFIPTLCSNFLRFIVKLERSPDSFSMRRTLPPIEGTLGLSACFLPNSVFPRCSERNLQESVLSEQDLMQPEEPDYLLDEMTKEAEIDNSSTVESLGETTDILNMTHIMSLNSNEKSLKLSPVQKQKDHEFSKTEELKLEDVDEEINAENVESKKKTVGDDESVPTGYHSKTEGAERTNDDSSAETIEKKEKANLEERAICEYNENPKGYMLDDADSSSLEILENSETTPSKDMKKTKKIFLFKRVPSINQKIVKNNNEPLPEIKSIGDQIILKSDNKDADQNHMSQNHQNIPPTNTERRSKSCTIL

SEQ ID NO: 245 - protein, 540 aa, Artificial Sequence
  derived and/or modified protein sequence (wt) from Homo sapiens__ENST00000645124.1__RPGR
MREPEELMPDSGAVFTFGKSKFAENNPGKFWFKNDVPVHLSCGDEHSAVVTGNNKLYMFGSNNWGQLGLGSKSAISKPTCVKALKPEKVKLAACGRNHTLVSTEGGNVYATGGNNEGQLGLGDTEERNTFHVISFFTSEHKIKQLSAGSNTSAALTEDGRLFMWGDNSEGQIGLKNVSNVCVPQQVTIGKPVSWISCGYYHSAFVTTDGELYVFGEPENGKLGLPNQLLGNHRTPQLVSEIPEKVIQVACGGEHTVVLTENAVYTFGLGQFGQLGLGTFLFETSEPKVIENIRDQTISYISCGENHTALITDIGLMYTFGDGRHGKLGLGLENFTNHFIPTLCSNFLRFIVKLVACGGCHMVVFAAPHRGVAKEIEFDEINDTCLSVATFLPYSSLTSGNVLQRTLSARMRRRERERSPDSFSMRRTLPPIEGTLGLSACFLPNSVFPRCSERNLQESVLSEQDLMQPEEPDYLLDEMTKEAEIDNSSTVESLGETTDILNMTHIMSLNSNEKSLKLSPVQKQKRSQRRRKEQRIQKEME

SEQ ID NO: 246 - protein, 508 aa, Artificial Sequence
  derived and/or modified protein sequence (wt) from Homo sapiens__ENST00000646020.1__RPGR
MREPEELMPDSGAVFTFGKSKFAENNPGKFWFKNDVPVHLSCGDEHSAVVTGNNKLYMFGSNNWGQLGLGSKSAISKPTCVKALKPEKVKLAACGRNHTLVSTEGGNVYATGGNNEGQLGLGDTEERNTFHVISFFTSEHKIKQLSAGSNTSAALTEDGRLFMWGDNSEGQIGLKNVSNVCVPQQVTIGKPVSWISCGYYHSAFVTTDGELYVFGEPENGKLGLPNQLLGNHRTPQLVSEIPEKVIQVACGGEHTVVLTENAVYTFGLGQFGQLGLGTFLFETSEPKVIENIRDQTISYISCGENHTALITVLLDLLSMQSLCRLKPEVPKDIGLMYTFGDGRHGKLGLGLENFTNHFIPTLCSNFLRFIVKLVACGGCHMVVFAAPHRGVAKEIEFDEINDTCLSVATFLPYSSLTSGNVLQRTLSARMRRRERERSPDSFSMRRTLPPIEGTLGLSACFLPNSVFPRCSERNLQESVLSEQDLMQPEEPDMRFHRVSQDGLDLLTL

SEQ ID NO: 247 - protein, 480 aa, Artificial Sequence
  derived and/or modified protein sequence (wt) from Homo sapiens__ENST00000474584.5__RPGR
MREPEELMPDSGAVFTFGKSKFAENNPGKFWFKNDVPVHLSCGDEHSAVVTGNNKLYMFGSNNWGQLGLGSKSAISKPTCVKALKPEKVKLAACGRNHTLVSTEGGNVYATGGNNEGQLGLGDTEERNTFHVISFFTSEHKIKQLSAGSNTSAALTEDGRLFMWGDNSEGQIGLKNVSNVCVPQQVTIGKPVSWISCGYYHSAFVTTDGELYVFGEPENGKLGLPNQLLGNHRTPQLVSEIPEKVIQVACGGEHTVVLTENAVYTFGLGQFGQLGLGTFLFETSEPKVIENIRDQTISYISCGENHTALITDIGLMYTFGDGRHGKLGLGLENFTNHFIPTLCSNFLRFIVKLVACGGCHMVVFAAPHRGVAKEIEFDEINDTCLSVATFLPYSSLTSGNVLQRTLSARMRRRERERSPDSFSMRRTLPPIEGTLGLSACFLPNSVFPRCSERNLQESVLSEQDLMQPEEPDTHHEPEFQ

SEQ ID NO: 248 - protein, 325 aa, Artificial Sequence
  derived and/or modified protein sequence (wt) from Homo sapiens__ENST00000647261.1__RPGR
MREPEELMPDSGAVFTFGKSKFAENNPGKFWFKNDVPVHLSCGDEHSAVVTGNNKLYMFGSNNWGQLGLGSKSAISKPTCVKALKPEKVKLAACGRNHTLVSTEGGNVYATGGNNEGQLGLGDTEERNTFHVISFFTSEHKIKQLSAGSNTSAALTEDGRLFMWGDNSEGQIGLKNVSNVCVPQQVTIGKPVSWISCGYYHSAFVTTDGELYVFGEPENGKLGLPNQLLGNHRTPQLVSEIPEKVIQVACGGEHTVVLTENAVYTFGLGQFGQLGLGTFLFETSEPKVIENIRDQTISYISCGENHTALITATAMKKLLKKLLLI

SEQ ID NO: 249 - protein, 167 aa, Artificial Sequence
  derived and/or modified protein sequence (wt) from Homo sapiens__ENST00000642373.1__RPGR
MREPEELMPDSGAVFTFGKSKFAENNPGKFWFKNDVPVHLSCGDEHSAVVTGNNKLYMFGSNNWGQLGLGSKSAISKPTCVKALKPEKVKLAACGRNHTLVSTEGGNVYATGGNNEGQLGLGDTEERNTFHVISFFTSEHKIKQLSAGSNTSAALTVLPRARSSRLF

SEQ ID NO: 250 - protein, 224 aa, Artificial Sequence
  derived and/or modified protein sequence (wt) from Homo sapiens__ENST00000379984.3__RS1
MSRKIEGFLLLLLFGYEATLGLSSTEDEGEDPWYQKACKCDCQGGPNALWSAGATSLDCIPECPYHKPLGFESGEVTPDQITCSNPEQYVGWYSSWTANKARLNSQGFGCAWLSKFQDSSQWLQIDLKEIKVISGILTQGRCDIDEWMTKYSVQYRTDERLNWIYYKDQTGNNRVFYGNSDRTSTVQNLLRPPIISRFIRLIPLGWHVRIAIRMELLECVSKCA

SEQ ID NO: 251 - protein, 775 aa, Artificial Sequence
  derived and/or modified protein sequence (wt) from Homo sapiens__ENST00000643230.1__SEMA3E
MASAGHIITLLLWGYLLELWTGGHTADTTHPRLRLSHKELLNLNRTSIFHSPFGFLDLHTMLLDEYQERLFVGGRDLVYSLSLERISDGYKEIHWPSTALKMEECIMKGKDAGECANYVRVLHHYNRTHLLTCGTGAFDPVCAFIRVGYHLEDPLFHLESPRSERGRGRCPFDPSSSFISTLIGSELFAGLYSDYWSRDAAIFRSMGRLAHIRTEHDDERLLKEPKFVGSYMIPDNEDRDDNKVYFFFTEKALEAENNAHAIYTRVGRLCVNDVGGQRILVNKWSTFLKARLVCSVPGMNGIDTYFDELEDVFLLPTRDHKNPVIFGLFNTTSNIFRGHAICVYHMSSIRAAFNGPYAHKEGPEYHWSVYEGKVPYPRPGSCASKVNGGRYGTTKDYPDDAIRFARSHPLMYQAIKPAHKKPILVKTDGKYNLKQIAVDRVEAEDGQYDVLFIGTDNGIVLKVITIYNQEMESMEEVILEELQIFKDPVPIISMEISSKRQQLYIGSASAVAQVRFHHCDMYGSACADCCLARDPYCAWDGISCSRYYPTGTHAKRRFRRQDVRHGNAAQQCFGQQFVGDALDKTEEHLAYGIENNSTLLECTPRSLQAKVIWFVQKGRETRKEEVKTDDRVVKMDLGLLFLRLHKSDAGTYFCQTVEHSFVHTVRKITLEVVEEEKVEDMFNKDDEEDRHHRMPCPAQSSISQGAKPWYKEFLQLIGYSNFQRVEEYCEKVWCTDRKRKKLKMSPSKWKYANPQEKKLRSKPEHYRLPRHTLDS

SEQ ID NO: 252 - protein, 715 aa, Artificial Sequence
  derived and/or modified protein sequence (wt) from Homo sapiens__ENST00000427262.6__SEMA3E
MLLDEYQERLFVGGRDLVYSLSLERISDGYKEIHWPSTALKMEECIMKGKDAGECANYVRVLHHYNRTHLLTCGTGAFDPVCAFIRVGYHLEDPLFHLESPRSERGRGRCPFDPSSSFISTLIGSELFAGLYSDYWSRDAAIFRSMGRLAHIRTEHDDERLLKEPKFVGSYMIPDNEDRDDNKVYFFFTEKALEAENNAHAIYTRVGRLCVNDVGGQRILVNKWSTFLKARLVCSVPGMNGIDTYFDELEDVFLLPTRDHKNPVIFGLFNTTSNIFRGHAICVYHMSSIRAAFNGPYAHKEGPEYHWSVYEGKVPYPRPGSCASKVNGGRYGTTKDYPDDAIRFARSHPLMYQAIKPAHKKPILVKTDGKYNLKQIAVDRVEAEDGQYDVLFIGTDNGIVLKVITIYNQEMESMEEVILEELQIFKDPVPIISMEISSKRQQLYIGSASAVAQVRFHHCDMYGSACADCCLARDPYCAWDGISCSRYYPTGTHAKRRFRRQDVRHGNAAQQCFGQQFVGDALDKTEEHLAYGIENNSTLLECTPRSLQAKVIWFVQKGRETRKEEVKTDDRVVKMDLGLLFLRLHKSDAGTYFCQTVEHSFVHTVRKITLEVVEEEKVEDMFNKDDEEDRHHRMPCPAQSSISQGAKPWYKEFLQLIGYSNFQRVEEYCEKVWCTDRKRKKLKMSPSKWKYANPQEKKLRSKPEHYRLPRHTLDS

SEQ ID NO: 253 - protein, 630 aa, Artificial Sequence
  derived and/or modified protein sequence (wt) from Homo sapiens__ENST00000642232.1__SEMA3E
MASAGHIITLLLWGYLLELWTGGHTADTTHPRLRLSHKELLNLNRTSIFHSPFGFLDLHTMLLDEYQERLFVGGRDLVYSLSLERISDGYKEIHWPSTALKMEECIMKGKDAGECANYVRVLHHYNRTHLLTCGTGAFDPVCAFIRVGYHLEDPLFHLESPRSERGRGRCPFDPSSSFISTLIGSELFAGLYSDYWSRDAAIFRSMGRLAHIRTEHDDERLLKEPKFVGSYMIPDNEDRDDNKVYFFFTEKALEAENNAHAIYTRVGRLCVNDVGGQRILVNKWSTFLKARLVCSVPGMNGIDTYFDELEDVFLLPTRDHKNPVIFGLFNTTSNIFRGHAICVYHMSSIRAAFNGPYAHKEGPEYHWSVYEGKVPYPRPGSCASKVNGGRYGTTKDYPDDAIRFARSHPLMYQAIKPAHKKPILVKTDGKYNLKQIAVDRVEAEDGQYDVLFIGTDNGIVLKVITIYNQEMESMEEVILEELQIFKDPVPIISMEISSKRQQLYIGSASAVAQVRFHHCDMYGSACADCCLARDPYCAWDGISCSRYYPTGTHAKRRFRRQDVRHGNAAQQCFGQQFVGDALDKTEEHLAYGIENNSTLLECTPRSLQAKVIWFVQKGRETRKEEVKAMS

SEQ ID NO: 254 - protein, 39 aa, Artificial Sequence
  derived and/or modified protein sequence (wt) from Homo sapiens__ENST00000453333.2__SEMA3E
MASAGHIITLLLWGYLLELWTGGHTADTTHPRLRLSHKE

SEQ ID NO: 255 - protein, 418 aa, Artificial Sequence
  derived and/or modified protein sequence (wt) from Homo sapiens__ENST00000254722.8__SERPINF1
MQALVLLLCIGALLGHSSCQNPASPPEEGSPDPDSTGALVEEEDPFFKVPVNKLAAAVSNFGYDLYRVRSSTSPTTNVLLSPLSVATALSALSLGAEQRTESIIHRALYYDLISSPDIHGTYKELLDTVTAPQKNLKSASRIVFEKKLRIKSSFVAPLEKSYGTRPRVLTGNPRLDLQEINNWVQAQMKGKLARSTKEIPDEISILLLGVAHFKGQWVTKFDSRKTSLEDFYLDEERTVRVPMMSDPKAVLRYGLDSDLSCKIAQLPLTGSMSIIFFLPLKVTQNLTLIEESLTSEFIHDIDRELKTVQAVLTVPKLKLSYEGEVTKSLQEMKLQSLFDSPDFSKITGKPIKLTQVEHRAGFEWNEDGAGTTPSPGLQPAHLTFPLDYHLNQPFIFVLRDTDTGALLFIGKILDPRGP

SEQ ID NO: 256 - protein, 114 aa, Artificial Sequence
  derived and/or modified protein sequence (wt) from Homo sapiens__ENST00000573770.5__SERPINF1
MQALVLLLCIGALLGHSSCQNPASPPEEGSPDPDSTGALVEEEDPFFKVPVNKLAAAVSNFGYDLYRVRSSTSPTTNVLLSPLSVATALSALSLGLMPLTYFRKISKDENSLAT

SEQ ID NO: 257 - protein, 747 aa, Artificial Sequence
  derived and/or modified protein sequence (wt) from Homo sapiens__ENST00000212015.10__SIRT1
MADEAALALQPGGSPSAAGADREAASSPAGEPLRKRPRRDGPGLERSPGEPGGAAPEREVPAAARGCPGAAAAALWREAEAEAAAAGGEQEAQATAAAGEGDNGPGLQGPSREPPLADNLYDEDDDDEGEEEEEAAAAAIGYRDNLLFGDEIITNGFHSCESDEEDRASHASSSDWTPRPRIGPYTFVQQHLMIGTDPRTILKDLLPETIPPPELDDMTLWQIVINILSEPPKRKKRKDINTIEDAVKLLQECKKIIVLTGAGVSVSCGIPDFRSRDGIYARLAVDFPDLPDPQAMFDIEYFRKDPRPFFKFAKEIYPGQFQPSLCHKFIALSDKEGKLLRNYTQNIDTLEQVAGIQRIIQCHGSFATASCLICKYKVDCEAVRGDIFNQVVPRCPRCPADEPLAIMKPEIVFFGENLPEQFHRAMKYDKDEVDLLIVIGSSLKVRPVALIPSSIPHEVPQILINREPLPHLHFDVELLGDCDVIINELCHRLGGEYAKLCCNPVKLSEITEKPPRTQKELAYLSELPPTPLHVSEDSSSPERTSPPDSSVIVTLLDQAAKSNDDLDVSESKGCMEEKPQEVQTSRNVESIAEQMENPDLKNVGSSTGEKNERTSVAGTVRKCWPNRVAKEQISRRLDGNQYLFLPPNRYIFHGAEVYSDSEDDVLSSSSCGSNSDSGTCQSPSLEEPMEDESEIEEFYNGLEDEPDVPERAGGAGFGTDGDDQEAINEAISVKQEVTDMNYPSNKS

SEQ ID NO: 258 - protein, 452 aa, Artificial Sequence
  derived and/or modified protein sequence (wt) from Homo sapiens__ENST00000432464.5__SIRT1
MFDIEYFRKDPRPFFKFAKEIYPGQFQPSLCHKFIALSDKEGKLLRNYTQNIDTLEQVAGIQRIIQCHGSFATASCLICKYKVDCEAVRGDIFNQVVPRCPRCPADEPLAIMKPEIVFFGENLPEQFHRAMKYDKDEVDLLIVIGSSLKVRPVALIPSSIPHEVPQILINREPLPHLHFDVELLGDCDVIINELCHRLGGEYAKLCCNPVKLSEITEKPPRTQKELAYLSELPPTPLHVSEDSSSPERTSPPDSSVIVTLLDQAAKSNDDLDVSESKGCMEEKPQEVQTSRNVESIAEQMENPDLKNVGSSTGEKNERTSVAGTVRKCWPNRVAKEQISRRLDGNQYLFLPPNRYIFHGAEVYSDSEDDVLSSSSCGSNSDSGTCQSPSLEEPMEDESEIEEFYNGLEDEPDVPERAGGAGFGTDGDDQEAINEAISVKQEVTDMNYPSNKS

SEQ ID NO: 259 - protein, 444 aa, Artificial Sequence
  derived and/or modified protein sequence (wt) from Homo sapiens__ENST00000406900.5__SIRT1
MCLCSGRKTILEIYPGQFQPSLCHKFIALSDKEGKLLRNYTQNIDTLEQVAGIQRIIQCHGSFATASCLICKYKVDCEAVRGDIFNQVVPRCPRCPADEPLAIMKPEIVFFGENLPEQFHRAMKYDKDEVDLLIVIGSSLKVRPVALIPSSIPHEVPQILINREPLPHLHFDVELLGDCDVIINELCHRLGGEYAKLCCNPVKLSEITEKPPRTQKELAYLSELPPTPLHVSEDSSSPERTSPPDSSVIVTLLDQAAKSNDDLDVSESKGCMEEKPQEVQTSRNVESIAEQMENPDLKNVGSSTGEKNERTSVAGTVRKCWPNRVAKEQISRRLDGNQYLFLPPNRYIFHGAEVYSDSEDDVLSSSSCGSNSDSGTCQSPSLEEPMEDESEIEEFYNGLEDEPDVPERAGGAGFGTDGDDQEAINEAISVKQEVTDMNYPSNKS

SEQ ID NO: 260 - protein, 389 aa, Artificial Sequence
  derived and/or modified protein sequence (wt) from Homo sapiens__ENST00000249396.11__SIRT2
MAEPDPSHPLETQAGKVQEAQDSDSDSEGGAAGGEADMDFLRNLFSQTLSLGSQKERLLDELTLEGVARYMQSERCRRVICLVGAGISTSAGIPDFRSPSTGLYDNLEKYHLPYPEAIFEISYFKKHPEPFFALAKELYPGQFKPTICHYFMRLLKDKGLLLRCYTQNIDTLERIAGLEQEDLVEAHGTFYTSHCVSASCRHEYPLSWMKEKIFSEVTPKCEDCQSLVKPDIVFFGESLPARFFSCMQSDFLKVDLLLVMGTSLQVQPFASLISKAPLSTPRLLINKEKAGQSDPFLGMIMGLGGGMDFDSKKAYRDVAWLGECDQGCLALAELLGWKKELEDLVRREHASIDAQSGAGVPNPSTSASPKKSPPPAKDEARTTEREKPQ

SEQ ID NO: 261 - protein, 389 aa, Artificial Sequence
  derived and/or modified protein sequence (wt) from Homo sapiens__ENST00000613542.4__SIRT2
MSDEAEDSDSDSEGGAAGGEADMDFLRNLFSQTLSLGSQKERLLDELTLEGVARYMQSERCRRVICLVGAGISTSAGIPDFRSPSTGLYDNLEKYHLPYPEAIFEISYFKKHPEPFFALAKELYPGQFKPTICHYFMRLLKDKGLLLRCYTQNIDTLERIAGLEQEDLVEAHGTFYTSHCVSASCRHEYPLSWMKEKIFSEVTPKCEDCQSLVKPDIVFFGESLPARFFSCMQSDFLKVDLLLVMGTSLQVQPFASLISKAPLSTPRLLINKEKAGQSDPFLGMIMGLGGGMDFDSKKAYRDVAWLGECDQGCLALAELLGWKKELEDLVRREHASIDAQGGGGPQPQHFSFPQEVPATCQGRGQDNREGETPVTAASPRRDAELLRDS

SEQ ID NO: 262 - protein, 352 aa, Artificial Sequence
  derived and/or modified protein sequence (wt) from Homo sapiens__ENST00000392081.6__SIRT2
MDFLRNLFSQTLSLGSQKERLLDELTLEGVARYMQSERCRRVICLVGAGISTSAGIPDFRSPSTGLYDNLEKYHLPYPEAIFEISYFKKHPEPFFALAKELYPGQFKPTICHYFMRLLKDKGLLLRCYTQNIDTLERIAGLEQEDLVEAHGTFYTSHCVSASCRHEYPLSWMKEKIFSEVTPKCEDCQSLVKPDIVFFGESLPARFFSCMQSDFLKVDLLLVMGTSLQVQPFASLISKAPLSTPRLLINKEKAGQSDPFLGMIMGLGGGMDFDSKKAYRDVAWLGECDQGCLALAELLGWKKELEDLVRREHASIDAQSGAGVPNPSTSASPKKSPPPAKDEARTTEREKPQ

SEQ ID NO: 263 - protein, 234 aa, Artificial Sequence
  derived and/or modified protein sequence (wt) from Homo sapiens__ENST00000358931.9__SIRT2
MDFLRNLFSQTLSLGSQKERLLDELTLEGVARYMQSERCRRVICLVGAGISTSAGIPDFRSPSTGLYDNLEKYHLPYPEAIFEISYFKKHPEPFFALAKELYPGQFKPTICHYFMRLLKDKGLLLRCYTQNIDTLERIAGLEQEDLVEAHGTFYTSHCVSASCRHEYPLSWMKEKIFSEVTPKCEDCQSLVKPDIVFFGESLPARFFSCMQSDFLKVDLLLVMGTSLQGRGLAG

SEQ ID NO: 264 - protein, 111 aa, Artificial Sequence
  derived and/or modified protein sequence (wt) from Homo sapiens__ENST00000420440.5__SIRT2
MDFLRNLFSQTLSLGSQKERLLDELTLEGVARYMQSERCRRVICLVGAGISTSAGIPDFRSPSTGLYDNLEKYHLPYPEAIFEISYFKKHPEPFFALAKELYPGQFKFPHL

SEQ ID NO: 265 - protein, 96 aa, Artificial Sequence
  derived and/or modified protein sequence (wt) from Homo sapiens__ENST00000443898.5__SIRT2
MAEPDPSHPLETQAGKVQEAQATFLPQPFPQTWYHPLSSLPNPTSRAWPLHPTPSRTQIQTLREEPLVEKQTWTSCGTYSPRRSAWAARRSVCWTS

SEQ ID NO: 266 - protein, 52 aa, Artificial Sequence
  derived and/or modified protein sequence (wt) from Homo sapiens__ENST00000423526.5__SIRT2
MDFLRNLFSQTLSLGSQKERLLDELTLEGVARYMQSERSATVSLLRQPGLLP

SEQ ID NO: 267 - protein, 39 aa, Artificial Sequence
  derived and/or modified protein sequence (wt) from Homo sapiens__ENST00000451193.5__SIRT2
MDFLRNLFSQTLSLGSQKERLLDELTLEGVARYMQSERC

SEQ ID NO: 268 - protein, 399 aa, Artificial Sequence
  derived and/or modified protein sequence (wt) from Homo sapiens__ENST00000382743.8__SIRT3
MAFWGWRAAAALRLWGRVVERVEAGGGVGPFQACGCRLVLGGRDDVSAGLRGSHGARGEPLDPARPLQRPPRPEVPRAFRRQPRAAAPSFFFSSIKGGRRSISFSVGASSVVGSGGSSDKGKLSLQDVAELIRARACQRVVVMVGAGISTPSGIPDFRSPGSGLYSNLQQYDLPYPEAIFELPFFFHNPKPFFTLAKELYPGNYKPNVTHYFLRLLHDKGLLLRLYTQNIDGLERVSGIPASKLVEAHGTFASATCTVCQRPFPGEDIRADVMADRVPRCPVCTGVVKPDIVFFGEPLPQRFLLHVVDFPMADLLLILGTSLEVEPFASLTEAVRSSVPRLLINRDLVGPLAWHPRSRDVAQLGDVVHGVESLVELLGWTEEMRDLVQRETGKLDGPDK

SEQ ID NO: 269 - protein, 353 aa, Artificial Sequence
  derived and/or modified protein sequence (wt) from Homo sapiens__ENST00000524564.5__SIRT3
MAFWGWRAAAALRLWGRVVERVEAGGGVGPFQACGCRLVLGGRDDVSAGLRGSHGARGEPLDPARPLQRPPRPEVPRAFRRQPRAAAPSFFFSRSPGSGLYSNLQQYDLPYPEAIFELPFFFHNPKPFFTLAKELYPGNYKPNVTHYFLRLLHDKGLLLRLYTQNIDGLERVSGIPASKLVEAHGTFASATCTVCQRPFPGEDIRADVMADRVPRCPVCTGVVKPDIVFFGEPLPQRFLLHVVDFPMADLLLILGTSLEVEPFASLTEAVRSSVPRLLINRDLVGPLAWHPRSRDVAQLGDVVHGVESLVELLGWTEEMRDLVQRETGKVQTAEEDHPRGCPSHCSRLDGPDK

SEQ ID NO: 270 - protein, 345 aa, Artificial Sequence
  derived and/or modified protein sequence (wt) from Homo sapiens__ENST00000532956.5__SIRT3
MAFWGWRAAAALRLWGRVVERVEAGGGVGPFQACGCRLVLGGRDDVSAGLRGSHGARGEPLDPARPLQRPPRPEVPRAFRRQPRAAAPSFFFSSIKGGRRSISFSVGASSVVGSGGSSDKGKLSLQDVAELIRARACQRVVVMVGAGISTPSGIPDFRSPGSGLYSNLQQYDLPYPEAIFELPFFFHNPKPFFTLAKELYPGNYKPNVTHYFLRLLHDKGLLLRLYTQNIDGLERVSGIPASKLVEAHGTFASATCTVCQRPFPGEDIRVEPFASLTEAVRSSVPRLLINRDLVGPLAWHPRSRDVAQLGDVVHGVESLVELLGWTEEMRDLVQRETGKLDGPDK

SEQ ID NO: 271 - protein, 318 aa, Artificial Sequence
  derived and/or modified protein sequence (wt) from Homo sapiens__ENST00000525319.5__SIRT3
MAFWGWRAAAALRLWGRVVERVEAGGGVGPFQACGCRLVLGGRDDDVAELIRARACQRVVVMVGAGISTPSGIPDFRSPGSGLYSNLQQYDLPYPEAIFELPFFFHNPKPFFTLAKELYPGNYKPNVTHYFLRLLHDKGLLLRLYTQNIDGLERVSGIPASKLVEAHGTFASATCTVCQRPFPGEDIRADVMADRVPRCPVCTGVVKPDIVFFGEPLPQRFLLHVVDFPMADLLLILGTSLEVEPFASLTEAVRSSVPRLLINRDLVGPLAWHPRSRDVAQLGDVVHGVESLVELLGWTEEMRDLVQRETGKLDGPDK

SEQ ID NO: 272 - protein, 257 aa, Artificial Sequence
  derived and/or modified protein sequence (wt) from Homo sapiens__ENST00000529382.5__SIRT3
MVGAGISTPSGIPDFRSPGSGLYSNLQQYDLPYPEAIFELPFFFHNPKPFFTLAKELYPGNYKPNVTHYFLRLLHDKGLLLRLYTQNIDGLERVSGIPASKLVEAHGTFASATCTVCQRPFPGEDIRADVMADRVPRCPVCTGVVKPDIVFFGEPLPQRFLLHVVDFPMADLLLILGTSLEVEPFASLTEAVRSSVPRLLINRDLVGPLAWHPRSRDVAQLGDVVHGVESLVELLGWTEEMRDLVQRETGKLDGPDK

SEQ ID NO: 273 - protein, 134 aa, Artificial Sequence
  derived and/or modified protein sequence (wt) from Homo sapiens__ENST00000529937.1__SIRT3
MAFWGWRAAAALRLWGRVVERVEAGGGVGPFQACGCRLVLGGRDDADVMADRVPRCPVCTGVVKPDIVFFGEPLPQRFLLHVVDFPMADLLLILGTSLEVCQQACAGRRLEGRGREGYRSHLMGPSRAGATLGR

SEQ ID NO: 274 - protein, 95 aa, Artificial Sequence
  derived and/or modified protein sequence (wt) from Homo sapiens__ENST00000526854.5__SIRT3
MAFWGWRAAAALRLWGRVVERVEAGGGVGPFQACGCRLVLGGRDDVSAGLRGSHGARGEPLDPARPLQRPPRPEVPRAFRRQPRAAAPSFFFSRM

SEQ ID NO: 275 - protein, 46 aa, Artificial Sequence
  derived and/or modified protein sequence (wt) from Homo sapiens__ENST00000532837.5__SIRT3
MAFWGWRAAAALRLWGRVVERVEAGGGVGPFQACGCRLVLGGRDDY

SEQ ID NO: 276 - protein, 314 aa, Artificial Sequence
  derived and/or modified protein sequence (wt) from Homo sapiens__ENST00000202967.4__SIRT4
MKMSFALTFRSAKGRWIANPSQPCSKASIGLFVPASPPLDPEKVKELQRFITLSKRLLVMTGAGISTESGIPDYRSEKVGLYARTDRRPIQHGDFVRSAPIRQRYWARNFVGWPQFSSHQPNPAHWALSTWEKLGKLYWLVTQNVDALHTKAGSRRLTELHGCMDRVLCLDCGEQTPRGVLQERFQVLNPTWSAEAHGLAPDGDVFLSEEQVRSFQVPTCVQCGGHLKPDVVFFGDTVNPDKVDFVHKRVKEADSLLVVGSSLQVYSGYRFILTAWEKKLPIAILNIGPTRSDDLACLKLNSRCGELLPLIDPC

SEQ ID NO: 277 - protein, 310 aa, Artificial Sequence
  derived and/or modified protein sequence (wt) from Homo sapiens__ENST00000606117.1__SIRT5
MRPLQIVPSRLISQLYCGLKPPASTRNQICLKMARPSSSMADFRKFFAKAKHIVIISGAGVSAESGVPTFRGAGGYWRKWQAQDLATPLAFAHNPSRVWEFYHYRREVMGSKEPNAGHRAIAECETRLGKQGRRVVVITQNIDELHRKAGTKNLLEIHGSLFKTRCTSCGVVAENYKSPICPALSGKGAPEPGTQDASIPVEKLPRCEEAGCGGLLRPHVVWFGENLDPAILEEVDRELAHCDLCLVVGTSSVVYPAAMFAPQVAARGVPVAEFNTETTPATNRFRFHFQGPCGTTLPEALACHENETVS

SEQ ID NO: 278 - protein, 299 aa, Artificial Sequence
  derived and/or modified protein sequence (wt) from Homo sapiens__ENST00000379262.8__SIRT5
MRPLQIVPSRLISQLYCGLKPPASTRNQICLKMARPSSSMADFRKFFAKAKHIVIISGAGVSAESGVPTFRGAGGYWRKWQAQDLATPLAFAHNPSRVWEFYHYRREVMGSKEPNAGHRAIAECETRLGKQGRRVVVITQNIDELHRKAGTKNLLEIHGSLFKTRCTSCGVVAENYKSPICPALSGKGAPEPGTQDASIPVEKLPRCEEAGCGGLLRPHVVWFGENLDPAILEEVDRELAHCDLCLVVGTSSVVYPAAMFAPQVAARGVPVAEFNTETTPATNRFSHLISISSLIIIKN

SEQ ID NO: 279 - protein, 292 aa, Artificial Sequence
  derived and/or modified protein sequence (wt) from Homo sapiens__ENST00000359782.8__SIRT5
MRPLQIVPSRLISQLYCGLKPPASTRNQICLKMARPSSSMADFRKFFAKAKHIVIISGAGVSAESGVPTFRGAGGYWRKWQAQDLATPLAFAHNPSRVWEFYHYRREVMGSKEPNAGHRAIAECETRLGKQGRRVVVITQNIDELHRKAGTKNLLEIHGSLFKTRCTSCGVVAENYKSPICPALSGKGCEEAGCGGLLRPHVVWFGENLDPAILEEVDRELAHCDLCLVVGTSSVVYPAAMFAPQVAARGVPVAEFNTETTPATNRFRFHFQGPCGTTLPEALACHENETVS

SEQ ID NO: 280 - protein, 202 aa, Artificial Sequence
  derived and/or modified protein sequence (wt) from Homo sapiens__ENST00000397350.6__SIRT5
MGSKEPNAGHRAIAECETRLGKQGRRVVVITQNIDELHRKAGTKNLLEIHGSLFKTRCTSCGVVAENYKSPICPALSGKGAPEPGTQDASIPVEKLPRCEEAGCGGLLRPHVVWFGENLDPAILEEVDRELAHCDLCLVVGTSSVVYPAAMFAPQVAARGVPVAEFNTETTPATNRFRFHFQGPCGTTLPEALACHENETVS

SEQ ID NO: 281 - protein, 79 aa, Artificial Sequence
  derived and/or modified protein sequence (wt) from Homo sapiens__ENST00000379250.10__SIRT5
MRPLQIVPSRLISQLYCGLKPPASTRNQICLKMARPSSRPGDSPGLCPQPVPGVGVLPLPAGGHGEQGAQRRAPRHSRV

SEQ ID NO: 282 - protein, 41 aa, Artificial Sequence
  derived and/or modified protein sequence (wt) from Homo sapiens__ENST00000606427.5__SIRT5
MRPLQIVPSRLISQLYCGLKPPASTRNQICLKMARPSSTQG

SEQ ID NO: 283 - protein, 355 aa, Artificial Sequence
  derived and/or modified protein sequence (wt) from Homo sapiens__ENST00000337491.6__SIRT6
MSVNYAAGLSPYADKGKCGLPEIFDPPEELERKVWELARLVWQSSSVVFHTGAGISTASGIPDFRGPHGVWTMEERGLAPKFDTTFESARPTQTHMALVQLERVGLLRFLVSQNVDGLHVRSGFPRDKLAELHGNMFVEECAKCKTQYVRDTVVGTMGLKATGRLCTVAKARGLRACRGELRDTILDWEDSLPDRDLALADEASRNADLSITLGTSLQIRPSGNLPLATKRRGGRLVIVNLQPTKHDRHADLRIHGYVDEVMTRLMKHLGLEIPAWDGPRVLERALPPLPRPPTPKLEPKEESPTRINGSIPAGPKQEPCAQHNGSEPASPKRERPTSPAPHRPPKRVKAKAVPS

SEQ ID NO: 284 - protein, 328 aa, Artificial Sequence
  derived and/or modified protein sequence (wt) from Homo sapiens__ENST00000305232.10__SIRT6
MSVNYAAGLSPYADKGKCGLPEIFDPPEELERKVWELARLVWQSSSVVFHTGAGISTASGIPDFRGPHGVWTMEERGLAPKFDTTFESARPTQTHMALVQLERVGLLRFLVSQNVDGLHVRSGFPRDKLAELHGNMFVEECAKCKTQYVRDTVVGTMGLKATGRLCTVAKARGLRACRNADLSITLGTSLQIRPSGNLPLATKRRGGRLVIVNLQPTKHDRHADLRIHGYVDEVMTRLMKHLGLEIPAWDGPRVLERALPPLPRPPTPKLEPKEESPTRINGSIPAGPKQEPCAQHNGSEPASPKRERPTSPAPHRPPKRVKAKAVPS

SEQ ID NO: 285 - protein, 187 aa, Artificial Sequence
  derived and/or modified protein sequence (wt) from Homo sapiens__ENST00000601488.5__SIRT6
MSVNYAAGLSPYADKGKCGLPEIFDPPEELERKVWELARLVWQSSSVVFHTGAGISTASGIPDFRDKLAELHGNMFVEECAKCKTQYVRDTVVGTMGLKATGRLCTVAKARGLRACRGELRDTILDWEDSLPDRDLALADEASRSGPAGTCRWLPSAGEAAWSSSTCSPPSTTAMLTSASMATLTRS

SEQ ID NO: 286 - protein, 176 aa, Artificial Sequence
  derived and/or modified protein sequence (wt) from Homo sapiens__ENST00000594279.5__SIRT6
MEERGLAPKFDTTFESARPTQTHMALVQLERVGLLRFLVSQNVDGLHVRSGFPRDKLAELHGNMFVEECAKCKTQYVRDTVVGTMGLKATGRLCTVAKARGLRACRGELRDTILDWEDSLPDRDLALADEASRSGPAGTCRWLPSAGEAAWSSSTCSPPSTTAMLTSASMATLTRS

SEQ ID NO: 287 - protein, 43 aa, Artificial Sequence
  derived and/or modified protein sequence (wt) from Homo sapiens__ENST00000599365.5__SIRT6
MSVNYAAGLSPYADKGKCGLPEGSPRSLDHGGARSGPQVRHHL

SEQ ID NO: 288 - protein, 400 aa, Artificial Sequence
  derived and/or modified protein sequence (wt) from Homo sapiens__ENST00000328666.10__SIRT7
MAAGGLSRSERKAAERVRRLREEQQRERLRQVSRILRKAAAERSAEEGRLLAESADLVTELQGRSRRREGLKRRQEEVCDDPEELRGKVRELASAVRNAKYLVVYTGAGISTAASIPDYRGPNGVWTLLQKGRSVSAADLSEAEPTLTHMSITRLHEQKLVQHVVSQNCDGLHLRSGLPRTAISELHGNMYIEVCTSCVPNREYVRVFDVTERTALHRHQTGRTCHKCGTQLRDTIVHFGERGTLGQPLNWEAATEAASRADTILCLGSSLKVLKKYPRLWCMTKPPSRRPKLYIVNLQWTPKDDWAALKLHGKCDDVMRLLMAELGLEIPAYSRWQDPIFSLATPLRAGEEGSHSRKSLCRSREEAPPGDRGAPLSSAPILGGWFGRGCTKRTKRKKVT

SEQ ID NO: 289 - protein, 116 aa, Artificial Sequence
  derived and/or modified protein sequence (wt) from Homo sapiens__ENST00000575360.5__SIRT7
MAAGGLSRSERKAAERVRRLREEQQRERLRQVSRILRKAAAERSAEEGRLLAESADLVTELQGRSRRREGLKRRQEEVCDDPEELRGKVRELASAVRNAKYLVVYTGAGISTVERE

SEQ ID NO: 290 - protein, 154 aa, Artificial Sequence [sequence omitted]

SEQ ID NO: 291 - protein, 135 aa, Artificial Sequence
  derived and/or modified protein sequence (wt) from Homo sapiens__ENST00000389995.4__SOD1
MATKAESNGPVKVWGSIKGLTEGLHGFHVHEFGDNTAGCTSAGPHFNPLSRKHGGPKDEERHVGDLGNVTADKDGVADVSIEDSVISLSGDHCIIGRTLVVHEKADDLGKGGNEESTKTGNAGSRLACGVIGIAQ

SEQ ID NO: 292 - protein, 407 aa, Artificial Sequence
  derived and/or modified protein sequence (wt) from Homo sapiens__ENST00000411851.3__TBXA2R
MWPNGSSLGPCFRPTNITLEERRLIASPWFAASFCVVGLASNLLALSVLAGARQGGSHTRSSFLTFLCGLVLTDFLGLLVTGTIVVSQHAALFEWHAVDPGCRLCRFMGVVMIFFGLSPLLLGAAMASERYLGITRPFSRPAVASQRRAWATVGLVWAAALALGLLPLLGVGRYTVQYPGSWCFLTLGAESGDVAFGLLFSMLGGLSVGLSFLLNTVSVATLCHVYHGQEAAQQRPRDSEVEMMAQLLGIMVVASVCWLPLLVFIAQTVLRNPPAMSPAGQLSRTTEKELLIYLRVATWNQILDPWVYILFRRAVLRRLQPRLSTRPRRSLTLWPSLEYSGTISAHCNLRLPGSSDSRASASRAAGITGVSHCARPCMLFDPEFDLLAGVQLLPFEPPTGKALSRKD

SEQ ID NO: 293 - protein, 343 aa, Artificial Sequence
  derived and/or modified protein sequence (wt) from Homo sapiens__ENST00000375190.8__TBXA2R
MWPNGSSLGPCFRPTNITLEERRLIASPWFAASFCVVGLASNLLALSVLAGARQGGSHTRSSFLTFLCGLVLTDFLGLLVTGTIVVSQHAALFEWHAVDPGCRLCRFMGVVMIFFGLSPLLLGAAMASERYLGITRPFSRPAVASQRRAWATVGLVWAAALALGLLPLLGVGRYTVQYPGSWCFLTLGAESGDVAFGLLFSMLGGLSVGLSFLLNTVSVATLCHVYHGQEAAQQRPRDSEVEMMAQLLGIMVVASVCWLPLLVFIAQTVLRNPPAMSPAGQLSRTTEKELLIYLRVATWNQILDPWVYILFRRAVLRRLQPRLSTRPRSLSLQPQLTQRSGLQ

SEQ ID NO: 294 - protein, 259 aa, Artificial Sequence
  derived and/or modified protein sequence (wt) from Homo sapiens__ENST00000589966.1__TBXA2R
MWPNGSSLGPCFRPTNITLEERRLIASPWFAASFCVVGLASNLLALSVLAGARQGGSHTRSSFLTFLCGLVLTDFLGLLVTGTIVVSQHAALFEWHAVDPGCRLCRFMGVVMIFFGLSPLLLGAAMASERYLGLHRPDSAAKPACHEPRRAAVPHHGEGAAHLLARGHLEPDPGPLGVYPVPPRRAPASPASPQHPAQVAVPPAPAHAALRAAVGSGQSAPPAPFRGALGPSDSPSACSEDSGAGGAGWTVGISSRVLG

SEQ ID NO: 295 - protein, 1124 aa, Artificial Sequence
  derived and/or modified protein sequence (wt) from Homo sapiens__ENST00000380036.8__TEK
MDSLASLVLCGVSLLLSGTVEGAMDLILINSLPLVSDAETSLTCIASGWRPHEPITIGRDFEALMNQHQDPLEVTQDVTREWAKKVVWKREKASKINGAYFCEGRVRGEAIRIRTMKMRQQASFLPATLTMTVDKGDNVNISFKKVLIKEEDAVIYKNGSFIHSVPRHEVPDILEVHLPHAQPQDAGVYSARYIGGNLFTSAFTRLIVRRCEAQKWGPECNHLCTACMNNGVCHEDTGECICPPGFMGRTCEKACELHTFGRTCKERCSGQEGCKSYVFCLPDPYGCSCATGWKGLQCNEACHPGFYGPDCKLRCSCNNGEMCDRFQGCLCSPGWQGLQCEREGIQRMTPKIVDLPDHIEVNSGKFNPICKASGWPLPTNEEMTLVKPDGTVLHPKDFNHTDHFSVAIFTIHRILPPDSGVWVCSVNTVAGMVEKPFNISVKVLPKPLNAPNVIDTGHNFAVINISSEPYFGDGPIKSKKLLYKPVNHYEAWQHIQVTNEIVTLNYLEPRTEYELCVQLVRRGEGGEGHPGPVRRFTTASIGLPPPRGLNLLPKSQTTLNLTWQPIFPSSEDDFYVEVERRSVQKSDQQNIKVPGNLTSVLLNNLHPREQYVVRARVNTKAQGEWSEDLTAWTLSDILPPQPENIKISNITHSSAVISWTILDGYSISSITIRYKVQGKNEDQHVDVKIKNATITQYQLKGLEPETAYQVDIFAENNIGSSNPAFSHELVTLPESQAPADLGGGKMLLIAILGSAGMTCLTVLLAFLIILQLKRANVQRRMAQAFQNVREEPAVQFNSGTLALNRKVKNNPDPTIYPVLDWNDIKFQDVIGEGNFGQVLKARIKKDGLRMDAAIKRMKEYASKDDHRDFAGELEVLCKLGHHPNIINLLGACEHRGYLYLAIEYAPHGNLLDFLRKSRVLETDPAFAIANSTASTLSSQQLLHFAADVARGMDYLSQKQFIHRDLAARNILVGENYVAKIADFGLSRGQEVYVKKTMGRLPVRWMAIESLNYSVYTTNSDVWSYGVLLWEIVSLGGTPYCGMTCAELYEKLPQGYRLEKPLNCDDEVYDLMRQCWREKPYERPSFAQILVSLNRMLEERKTYVNTTLYEKFTYAGIDCSAEEAA

SEQ ID NO: 296 - protein, 1081 aa, Artificial Sequence
  derived and/or modified protein sequence (wt) from Homo sapiens__ENST00000406359.8__TEK
MDSLASLVLCGVSLLLSGTVEGAMDLILINSLPLVSDAETSLTCIASGWRPHEPITIGRDFEALMNQHQDPLEVTQDVTREWAKKVVWKREKASKINGAYFCEGRVRGEAIRIRTMKMRQQASFLPATLTMTVDKGDNVNISFKKVLIKEEDAVIYKNGSFIHSVPRHEVPDILEVHLPHAQPQDAGVYSARYIGGNLFTSAFTRLIVRRCEAQKWGPECNHLCTACMNNGVCHEDTGECICPPGFMGRTCEKACELHTFGRTCKERCSGQEGCKSYVFCLPDPYGCSCATGWKGLQCNEGIQRMTPKIVDLPDHIEVNSGKFNPICKASGWPLPTNEEMTLVKPDGTVLHPKDFNHTDHFSVAIFTIHRILPPDSGVWVCSVNTVAGMVEKPFNISVKVLPKPLNAPNVIDTGHNFAVINISSEPYFGDGPIKSKKLLYKPVNHYEAWQHIQVTNEIVTLNYLEPRTEYELCVQLVRRGEGGEGHPGPVRRFTTASIGLPPPRGLNLLPKSQTTLNLTWQPIFPSSEDDFYVEVERRSVQKSDQQNIKVPGNLTSVLLNNLHPREQYVVRARVNTKAQGEWSEDLTAWTLSDILPPQPENIKISNITHSSAVISWTILDGYSISSITIRYKVQGKNEDQHVDVKIKNATITQYQLKGLEPETAYQVDIFAENNIGSSNPAFSHELVTLPESQAPADLGGGKMLLIAILGSAGMTCLTVLLAFLIILQLKRANVQRRMAQAFQNVREEPAVQFNSGTLALNRKVKNNPDPTIYPVLDWNDIKFQDVIGEGNFGQVLKARIKKDGLRMDAAIKRMKEYASKDDHRDFAGELEVLCKLGHHPNIINLLGACEHRGYLYLAIEYAPHGNLLDFLRKSRVLETDPAFAIANSTASTLSSQQLLHFAADVARGMDYLSQKQFIHRDLAARNILVGENYVAKIADFGLSRGQEVYVKKTMGRLPVRWMAIESLNYSVYTTNSDVWSYGVLLWEIVSLGGTPYCGMTCAELYEKLPQGYRLEKPLNCDDEVYDLMRQCWREKPYERPSFAQILVSLNRMLEERKTYVNTTLYEKFTYAGIDCSAEEAA

SEQ ID NO: 297 - protein, 976 aa, Artificial Sequence
  derived and/or modified protein sequence (wt) from Homo sapiens__ENST00000519097.5__TEK
MDSLASLVLCGVSLLLSASFLPATLTMTVDKGDNVNISFKKVLIKEEDAVIYKNGSFIHSVPRHEVPDILEVHLPHAQPQDAGVYSARYIGGNLFTSAFTRLIVRRCEAQKWGPECNHLCTACMNNGVCHEDTGECICPPGFMGRTCEKACELHTFGRTCKERCSGQEGCKSYVFCLPDPYGCSCATGWKGLQCNEGIQRMTPKIVDLPDHIEVNSGKFNPICKASGWPLPTNEEMTLVKPDGTVLHPKDFNHTDHFSVAIFTIHRILPPDSGVWVCSVNTVAGMVEKPFNISVKVLPKPLNAPNVIDTGHNFAVINISSEPYFGDGPIKSKKLLYKPVNHYEAWQHIQVTNEIVTLNYLEPRTEYELCVQLVRRGEGGEGHPGPVRRFTTASIGLPPPRGLNLLPKSQTTLNLTWQPIFPSSEDDFYVEVERRSVQKSDQQNIKVPGNLTSVLLNNLHPREQYVVRARVNTKAQGEWSEDLTAWTLSDILPPQPENIKISNITHSSAVISWTILDGYSISSITIRYKVQGKNEDQHVDVKIKNATITQYQLKGLEPETAYQVDIFAENNIGSSNPAFSHELVTLPESQAPADLGGGKMLLIAILGSAGMTCLTVLLAFLIILQLKRANVQRRMAQAFQNREEPAVQFNSGTLALNRKVKNNPDPTIYPVLDWNDIKFQDVIGEGNFGQVLKARIKKDGLRMDAAIKRMKEYASKDDHRDFAGELEVLCKLGHHPNIINLLGACEHRGYLYLAIEYAPHGNLLDFLRKSRVLETDPAFAIANSTASTLSSQQLLHFAADVARGMDYLSQKQFIHRDLAARNILVGENYVAKIADFGLSRGQEVYVKKTMGRLPVRWMAIESLNYSVYTTNSDVWSYGVLLWEIVSLGGTPYCGMTCAELYEKLPQGYRLEKPLNCDDEVYDLMRQCWREKPYERPSFAQILVSLNRMLEERKTYVNTTLYEKFTYAGIDCSAEEAA

SEQ ID NO: 298 - protein, 468 aa, Artificial Sequence
  derived and/or modified protein sequence (wt) from Homo sapiens__ENST00000615002.4__TEK
MDSLASLVLCGVSLLLSGTVEGAMDLILINSLPLVSDAETSLTCIASGWRPHEPITIGRDFEALMNQHQDPLEVTQDVTREWAKKVVWKREKASKINGAYFCEGRVRGEAIRIRTMKMRQQASFLPATLTMTVDKGDNVNISFKKVLIKEEDAVIYKNGSFIHSVPRHEVPDILEVHLPHAQPQDAGVYSARYIGGNLFTSAFTRLIVRRCEAQKWGPECNHLCTACMNNGVCHEDTGECICPPGFMGRTCEKACELHTFGRTCKERCSGQEGCKSYVFCLPDPYGCSCATGWKGLQCNEGIQRMTPKIVDLPDHIEVNSGKFNPICKASGWPLPTNEEMTLVKPDGTVLHPKDFNHTDHFSVAIFTIHRILPPDSGVWVCSVNTVAGMVEKPFNISVKVLPKPLNAPNVIDTGHNFAVINISSEPYFGDGPIKSKKLLYKPVNHYEAWQHIQVSMEKQRLTKANSDK

SEQ ID NO: 299 - protein, 1138 aa, Artificial Sequence
  derived and/or modified protein sequence (wt) from Homo sapiens__ENST00000372476.7__TIE1
MVWRVPPFLLPILFLASHVGAAVDLTLLANLRLTDPQRFFLTCVSGEAGAGRGSDAWGPPLLLEKDDRIVRTPPGPPLRLARNGSHQVTLRGFSKPSDLVGVFSCVGGAGARRTRVIYVHNSPGAHLLPDKVTHTVNKGDTAVLSARVHKEKQTDVIWKSNGSYFYTLDWHEAQDGRFLLQLPNVQPPSSGIYSATYLEASPLGSAFFRLIVRGCGAGRWGPGCTKECPGCLHGGVCHDHDGECVCPPGFTGTRCEQACREGRFGQSCQEQCPGISGCRGLTFCLPDPYGCSCGSGWRGSQCQEACAPGHFGADCRLQCQCQNGGTCDRFSGCVCPSGWHGVHCEKSDRIPQILNMASELEFNLETMPRINCAAAGNPFPVRGSIELRKPDGTVLLSTKAIVEPEKTTAEFEVPRLVLADSGFWECRVSTSGGQDSRRFKVNVKVPPVPLAAPRLLTKQSRQLVVSPLVSFSGDGPISTVRLHYRPQDSTMDWSTIVVDPSENVTLMNLRPKTGYSVRVQLSRPGEGGEGAWGPPTLMTTDCPEPLLQPWLEGWHVEGTDRLRVSWSLPLVPGPLVGDGFLLRLWDGTRGQERRENVSSPQARTALLTGLTPGTHYQLDVQLYHCTLLGPASPPAHVLLPPSGPPAPRHLHAQALSDSEIQLTWKHPEALPGPISKYVVEVQVAGGAGDPLWIDVDRPEETSTIIRGLNASTRYLFRMRASIQGLGDWSNTVEESTLGNGLQAEGPVQESRAAEEGLDQQLILAVVGSVSATCLTILAALLTLVCIRRSCLHRRRTFTYQSGSGEETILQFSSGTLTLTRRPKLQPEPLSYPVLEWEDITFEDLIGEGNFGQVIRAMIKKDGLKMNAAIKMLKEYASENDHRDFAGELEVLCKLGHHPNIINLLGACKNRGYLYIAIEYAPYGNLLDFLRKSRVLETDPAFAREHGTASTLSSRQLLRFASDAANGMQYLSEKQFIHRDLAARNVLVGENLASKIADFGLSRGEEVYVKKTMGRLPVRWMAIESLNYSVYTTKSDVWSFGVLLWEIVSLGGTPYCGMTCAELYEKLPQGYRMEQPRNCDDEVYELMRQCWRDRPYERPPFAQIALQLGRMLEARKAYVNMSLFENFTYAGIDATAEEA

SEQ ID NO: 300 - protein, 379 aa, Artificial Sequence
  derived and/or modified protein sequence (wt) from Homo sapiens__ENST00000538015.1__TIE1
MVWRVPPFLLPILFLASHVGAAVDLTLLANLRLTDPQRFFLTCVSGEAGAGRGSDAWGPPLLLEKDDRIVRTPPGPPLRLARNGSHQVTLRGFSKPSDLVGVFSCVGGAGARRTRVIYVHNSPGAHLLPDKVTHTVNKGDTAVLSARVHKEKQTDVIWKSNGSYFYTLDWHEAQDGRFLLQLPNVQPPSSGIYSATYLEASPLGSAFFRLIVRGCGAGRWGPGCTKECPGCLHGGVCHDHDGECVCPPGFTGTRCEQACREGRFGQSCQEQCPGISGCRGLTFCLPDPYGCSCGSGWRGSQCQEACAPGHFGADCRLQCQCQNGGTCDRFSGCVCPSGWHGVHCEKSGWRDWVDTSTEKQNTDEGRFGGHVSAPVGAPG

SEQ ID NO: 301 - protein, 233 aa, Artificial Sequence
  derived and/or modified protein sequence (wt) from Homo sapiens__ENST00000449264.2__TNF
MSTESMIRDVELAEEALPKKTGGPQGSRRCLFLSLFSFLIVAGATTLFCLLHFGVIGPQREEFPRDLSLISPLAQAVRSSSRTPSDKPVAHVVANPQAEGQLQWLNRRANALLANGVELRDNQLVVPSEGLYLIYSQVLFKGQGCPSTHVLLTHTISRIAVSYQTKVNLLSAIKSPCQRETPEGAEAKPWYEPIYLGGVFQLEKGDRLSAEINRPDYLDFAESGQVYFGIIAL

SEQ ID NO: 302 - protein, 259 aa, Artificial Sequence
  derived and/or modified protein sequence (wt) from Homo sapiens__ENST00000356864.3__TNFRSF10C
MARIPKTLKFVVVIVAVLLPVLAYSATTARQEEVPQQTVAPQQQRHSFKGEECPAGSHRSEHTGACNPCTEGVDYTNASNNEPSCFPCTVCKSDQKHKSSCTMTRDTVCQCKEGTFRNENSPEMCRKCSRCPSGEVQVSNCTSWDDIQCVEEFGANATVETPAAEETMNTSPGTPAPAAEETMNTSPGTPAPAAEETMTTSPGTPAPAAEETMTTSPGTPAPAAEETMITSPGTPASSHYLSCTIVGIIVLIVLLIVFV

SEQ ID NO: 303 - protein, 67 aa, Artificial Sequence
  derived and/or modified protein sequence (wt) from Homo sapiens__ENST00000517558.1__TNFRSF10C
MARIPKTLKFVVVIVAVLLPDLIDQNILEPVTRAQRVWITPTLPTMNLLASHVQFVNQIKNIKVPAP

SEQ ID NO: 304 - protein, 945 aa, Artificial Sequence
  derived and/or modified protein sequence (wt) from Homo sapiens__ENST00000335350.10__UNC5B
MGARSGARGALLLALLLCWDPRLSQAGTDSGSEVLPDSFPSAPAEPLPYFLQEPQDAYIVKNKPVELRCRAFPATQIYFKCNGEWVSQNDHVTQEGLDEATGLRVREVQIEVSRQQVEELFGLEDYWCQCVAWSSAGTTKSRRAYVRIAYLRKNFDQEPLGKEVPLDHEVLLQCRPPEGVPVAEVEWLKNEDVIDPTQDTNFLLTIDHNLIIRQARLSDTANYTCVAKNIVAKRRSTTATVIVYVNGGWSSWAEWSPCSNRCGRGWQKRTRTCTNPAPLNGGAFCEGQAFQKTACTTICPVDGAWTEWSKWSACSTECAHWRSRECMAPPPQNGGRDCSGTLLDSKNCTDGLCMQNKKTLSDPNSHLLEASGDAALYAGLVVAIFVVVAILMAVGVVVYRRNCRDFDTDITDSSAALTGGFHPVNFKTARPSNPQLLHPSVPPDLTASAGIYRGPVYALQDSTDKIPMTNSPLLDPLPSLKVKVYSSSTTGSGPGLADGADLLGVLPPGTYPSDFARDTHFLHLRSASLGSQQLLGLPRDPGSSVSGTFGCLGGRLSIPGTGVSLLVPNGAIPQGKFYEMYLLINKAESTLPLSEGTQTVLSPSVTCGPTGLLLCRPVILTMPHCAEVSARDWIFQLKTQAHQGHWEEVVTLDEETLNTPCYCQLEPRACHILLDQLGTYVFTGESYSRSAVKRLQLAVFAPALCTSLEYSLRVYCLEDTPVALKEVLELERTLGGYLVEEPKPLMFKDSYHNLRLSLHDLPHAHWRSKLLAKYQEIPFYHIWSGSQKALHCTFTLERHSLASTELTCKICVRQVEGEGQIFQLHTTLAETPAGSLDTLCSAPGSTVTTQLGPYAFKIPLSIRQKICNSLDAPNSRGNDWRMLAQKLSMDRYLNYFATKASPTGVILDLWEALQQDDGDLNSLASALEEMGKSEMLVAVATDGDC

SEQ ID NO: 305 - protein, 934 aa, Artificial Sequence
  derived and/or modified protein sequence (wt) from Homo sapiens__ENST00000373192.4__UNC5B
MGARSGARGALLLALLLCWDPRLSQAGTDSGSEVLPDSFPSAPAEPLPYFLQEPQDAYIVKNKPVELRCRAFPATQIYFKCNGEWVSQNDHVTQEGLDEATGLRVREVQIEVSRQQVEELFGLEDYWCQCVAWSSAGTTKSRRAYVRIAYLRKNFDQEPLGKEVPLDHEVLLQCRPPEGVPVAEVEWLKNEDVIDPTQDTNFLLTIDHNLIIRQARLSDTANYTCVAKNIVAKRRSTTATVIVYVNGGWSSWAEWSPCSNRCGRGWQKRTRTCTNPAPLNGGAFCEGQAFQKTACTTICPVDGAWTEWSKWSACSTECAHWRSRECMAPPPQNGGRDCSGTLLDSKNCTDGLCMQMLEASGDAALYAGLVVAIFVVVAILMAVGVVVYRRNCRDFDTDITDSSAALTGGFHPVNFKTARPSNPQLLHPSVPPDLTASAGIYRGPVYALQDSTDKIPMTNSPLLDPLPSLKVKVYSSSTTGSGPGLADGADLLGVLPPGTYPSDFARDTHFLHLRSASLGSQQLLGLPRDPGSSVSGTFGCLGGRLSIPGTGVSLLVPNGAIPQGKFYEMYLLINKAESTLPLSEGTQTVLSPSVTCGPTGLLLCRPVILTMPHCAEVSARDWIFQLKTQAHQGHWEEVVTLDEETLNTPCYCQLEPRACHILLDQLGTYVFTGESYSRSAVKRLQLAVFAPALCTSLEYSLRVYCLEDTPVALKEVLELERTLGGYLVEEPKPLMFKDSYHNLRLSLHDLPHAHWRSKLLAKYQEIPFYHIWSGSQKALHCTFTLERHSLASTELTCKICVRQVEGEGQIFQLHTTLAETPAGSLDTLCSAPGSTVTTQLGPYAFKIPLSIRQKICNSLDAPNSRGNDWRMLAQKLSMDRYLNYFATKASPTGVILDLWEALQQDDGDLNSLASALEEMGKSEMLVAVATDGDC

SEQ ID NO: 306 - protein, 5202 aa, Artificial Sequence
  derived and/or modified protein sequence (wt) from Homo sapiens__ENST00000307340.7__USH2A
MNCPVLSLGSGFLFQVIEMLIFAYFASISLTESRGLFPRLENVGAFKKVSIVPTQAVCGLPDRSTFCHSSAAAESIQFCTQRFCIQDCPYRSSHPTYTALFSAGLSSCITPDKNDLHPNAHSNSASFIFGNHKSCFSSPPSPKLMASFTLAVWLKPEQQGVMCVIEKTVDGQIVFKLTISEKETMFYYRTVNGLQPPIKVMTLGRILVKKWIHLSVQVHQTKISFFINGVEKDHTPFNARTLSGSITDFASGTVQIGQSLNGLEQFVGRMQDFRLYQVALTNREILEVFSGDLLRLHAQSHCRCPGSHPRVHPLAQRYCIPNDAGDTADNRVSRLNPEAHPLSFVNDNDVGTSWVSNVFTNITQLNQGVTISVDLENGQYQVFYIIIQFFSPQPTEIRIQRKKENSLDWEDWQYFARNCGAFGMKNNGDLEKPDSVNCLQLSNFTPYSRGNVTFSILTPGPNYRPGYNNFYNTPSLQEFVKATQIRFHFHGQYYTTETAVNLRHRYYAVDEITISGRCQCHGHADNCDTTSQPYRCLCSQESFTEGLHCDRCLPLYNDKPFRQGDQVYAFNCKPCQCNSHSKSCHYNISVDPFPFEHFRGGGGVCDDCEHNTTGRNCELCKDYFFRQVGADPSAIDVCKPCDCDTVGTRNGSILCDQIGGQCNCKRHVSGRQCNQCQNGFYNLQELDPDGCSPCNCNTSGTVDGDITCHQNSGQCKCKANVIGLRCDHCNFGFKFLRSFNDVGCEPCQCNLHGSVNKFCNPHSGQCECKKEAKGLQCDTCRENFYGLDVTNCKACDCDTAGSLPGTVCNAKTGQCICKPNVEGRQCNKCLEGNFYLRQNNSFLCLPCNCDKTGTINGSLLCNKSTGQCPCKLGVTGLRCNQCEPHRYNLTIDNFQHCQMCECDSLGTLPGTICDPISGQCLCVPNRQGRRCNQCQPGFYISPGNATGCLPCSCHTTGAVNHICNSLTGQCVCQDASIAGQRCDQCKDHYFGFDPQTGRCQPCNCHLSGALNETCHLVTGQCFCKQFVTGSKCDACVPSASHLDVNNLLGCSKTPFQQPPPRGQVQSSSAINLSWSPPDSPNAHWLTYSLLRDGFEIYTTEDQYPYSIQYFLDTDLLPYTKYSYYIETTNVHGSTRSVAVTYKTKPGVPEGNLTLSYIIPIGSDSVTLTWTTLSNQSGPIEKYILSCAPLAGGQPCVSYEGHETSATIWNLVPFAKYDFSVQACTSGGCLHSLPITVTTAQAPPQRLSPPKMQKISSTELHVEWSPPAELNGIIIRYELYMRRLRSTKETTSEESRVFQSSGWLSPHSFVESANENALKPPQTMTTITGLEPYTKYEFRVLAVNMAGSVSSAWVSERTGESAPVFMIPPSVFPLSSYSLNISWEKPADNVTRGKVVGYDINMLSEQSPQQSIPMAFSQLLHTAKSQELSYTVEGLKPYRIYEFTITLCNSVGCVTSASGAGQTLAAAPAQLRPPLVKGINSTTIHLRWFPPEELNGPSPIYQLERRESSLPALMTTMMKGIRFIGNGYCKFPSSTHPVNTDFTGIKASFRTKVPEGLIVFAASPGNQEEYFALQLKKGRLYFLFDPQGSPVEVTTTNDHGKQYSDGKWHEIIAIRHQAFGQITLDGIYTGSSAILNGSTVIGDNTGVFLGGLPRSYTILRKDPEIIQKGFVGCLKDVHFMKNYNPSAIWEPLDWQSSEEQINVYNSWEGCPASLNEGAQFLGAGFLELHPYMFHGGMNFEISFKFRTDQLNGLLLFVYNKDGPDFLAMELKSGILTFRLNTSLAFTQVDLLLGLSYCNGKWNKVIIKKEGSFISASVNGLMKHASESGDQPLVVNSPVYVGGIPQELLNSYQHLCLEQGFGGCMKDVKFTRGAVVNLASVSSGAVRVNLDGCLSTDSAVNCRGNDSILVYQGKEQSVYEGGLQPFTEYLYRVIASHEGGSVYSDWSRGRTTGAAPQSVPTPSRVRSLNGYSIEVTWDEPVVRGVIEKYILKAYSEDSTRPPRMPSASAEFVNTSNLTGILTGLLPFKNYAVTLTACTLAGCTESSHALNISTPQEAPQEVQPPVAKSLPSSLLLSWNPPKKANGIITQYCLYMDGRLIYSGSEENYIVTDLAVFTPHQFLLSACTHVGCTNSSWVLLYTAQLPPEHVDSPVLTVLDSRTIHIQWKQPRKISGILERYVLYMSNHTHDFTIWSVIYNSTELFQDHMLQYVLPGNKYLIKLGACTGGGCTVSEASEALTDEDIPEGVPAPKAHSYSPDSFNVSWTEPEYPNGVITSYGLYLDGILIHNSSELSYRAYGFAPWSLHSFRVQACTAKGCALGPLVENRTLEAPPEGTVNVFVKTQGSRKAHVRWEAPFRPNGLLTHSVLFTGIFYVDPVGNNYTLLNVTKVMYSGEETNLWVLIDGLVPFTNYTVQVNISNSQGSLITDPITIAMPPGAPDGVLPPRLSSATPTSLQVVWSTPARNNAPGSPRYQLQMRSGDSTHGFLELFSNPSASLSYEVSDLQPYTEYMFRLVASNGFGSAHSSWIPFMTAEDKPGPVVPPILLDVKSRMMLVTWQHPRKSNGVITHYNIYLHGRLYLRTPGNVTNCTVMHLHPYTAYKFQVEACTSKGCSLSPESQTVWTLPGAPEGIPSPELFSDTPTSVIISWQPPTHPNGLVENFTIERRVKGKEEVTTLVTLPRSHSMRFIDKTSALSPWTKYEYRVLMSTLHGGTNSSAWVEVTTRPSRPAGVQPPVVTVLEPDAVQVTWKPPLIQNGDILSYEIHMPDPHITLTNVTSAVLSQKVTHLIPFTNYSVTIVACSGGNGYLGGCTESLPTYVTTHPTVPQNVGPLSVIPLSESYVVISWQPPSKPNGPNLRYELLRRKIQQPLASNPPEDLNRWHNIYSGTQWLYEDKGLSRFTTYEYMLFVHNSVGFTPSREVTVTTLAGLPERGANLTASVLNHTAIDVRWAKPTVQDLQGEVEYYTLFWSSATSNDSLKILPDVNSHVIGHLKPNTEYWIFISVFNGVHSINSAGLHATTCDGEPQGMLPPEVVIINSTAVRVIWTSPSNPNGVVTEYSIYVNNKLYKTGMNVPGSFILRDLSPFTIYDIQVEVCTIYACVKSNGTQITTVEDTPSDIPTPTIRGITSRSLQIDWVSPRKPNGIILGYDLLWKTWYPCAKTQKLVQDQSDELCKAVRCQKPESICGHICYSSEAKVCCNGVLYNPKPGHRCCEEKYIPFVLNSTGVCCGGRIQEAQPNHQCCSGYYARILPGEVCCPDEQHNRVSVGIGDSCCGRMPYSTSGNQICCAGRLHDGHGQKCCGRQIVSNDLECCGGEEGVVYNRLPGMFCCGQDYVNMSDTICCSASSGESKAHIKKNDPVPVKCCETELIPKSQKCCNGVGYNPLKYVCSDKISTGMMMKETKECRILCPASMEATEHCGRCDFNFTSHICTVIRGSHNSTGKASIEEMCSSAEETIHTGSVNTYSYTDVNLKPYMTYEYRISAWNSYGRGLSKAVRARTKEDVPQGVSPPTWTKIDNLEDTIVLNWRKPIQSNGPIIYYILLRNGIERFRGTSLSFSDKEGIQPFQEYSYQLKACTVAGCATSSKVVAATTQGVPESILPPSITALSAVALHLSWSVPEKSNGVIKEYQIRQVGKGLIHTDTTDRRQHTVTGLQPYTNYSFTLTACTSAGCTSSEPFLGQTLQAAPEGVWVTPRHIIINSTTVELYWSLPEKPNGLVSQYQLSRNGNLLFLGGSEEQNFTDKNLEPNSRYTYKLEVKTGGGSSASDDYIVQTPMSTPEEIYPPYNITVIGPYSIFVAWIPPGILIPEIPVEYNVLLNDGSVTPLAFSVGHHQSTLLENLTPFTQYEIRIQACQNGSCGVSSRMFVKTPEAAPMDLNSPVLKALGSACIEIKWMPPEKPNGIIINYFIYRRPAGIEEESVLFVWSEGALEFMDEGDTLRPFTLYEYRVRACNSKGSVESLWSLTQTLEAPPQDFPAPWAQATSAHSVLLNWTKPESPNGIISHYRVVYQERPDDPTFNSPTVHAFTVKGTSHQAHLYGLEPFTTYRIGVVAANHAGEILSPWTLIQTLESSPSGLRNFIVEQKENGRALLLQWSEPMRTNGVIKTYNIFSDGFLEYSGLNRQFLFRRLDPFTLYTLTLEACTRAGCAHSAPQPLWTDEAPPDSQLAPTVHSVKSTSVELSWSEPVNPNGKIIRYEVIRRCFEGKAWGNQTIQADEKIVFTEYNTERNTFMYNDTGLQPWTQCEYKIYTWNSAGHTCSSWNVVRTLQAPPEGLSPPVISYVSMNPQKLLISWIPPEQSNGIIQSYRLQRNEMLYPFSFDPVTFNYTDEELLPFSTYSYALQACTSGGCSTSKPTSITTLEAAPSEVSPPDLWAVSATQMNVCWSPPTVQNGKITKYLVRYDNKESLAGQGLCLLVSHLQPYSQYNFSLVACTNGGCTASVSKSAWTMEALPENMDSPTLQVTGSESIEITWKPPRNPNGQIRSYELRRDGTIVYTGLETRYRDFTLTPGVEYSYTVTASNSQGGILSPLVKDRTSPSAPSGMEPPKLQARGPQEILVNWDPPVRTNGDIINYTLFIRELFERETKIIHINTTHNSFGMQSYIVNQLKPFHRYEIRIQACTTLGCASSDWTFIQTPEIAPLMQPPPHLEVQMAPGGFQPTVSLLWTGPLQPNGKVLYYELYRRQIATQPRKSNPVLIYNGSSTSFIDSELLPFTEYEYQVWAVNSAGKAPSSWTWCRTGPAPPEGLRAPTFHVISSTQAVVNISAPGKPNGIVSLYRLFSSSAHGAETVLSEGMATQQTLHGLQAFTNYSIGVEACTCFNCCSKGPTAELRTHPAPPSGLSSPQIGTLASRTASFRWSPPMFPNGVIHSYELQFHVACPPDSALPCTPSQIETKYTGLGQKASLGGLQPYTTYKLRVVAHNEVGSTASEWISFTTQKELPQYRAPFSVDSNLSVVCVNWSDTFLLNGQLKEYVLTDGGRRVYSGLDTTLYIPRTADKTFFFQVICTTDEGSVKTPLIQYDTSTGLGLVLTTPGKKKGSRSKSTEFYSELWFIVLMAMLGLILLAIFLSLILQRKIHKEPYIRERPPLVPLQKRMSPLNVYPPGENHMGLADTKIPRSGTPVSIRSNRSACVLRIPSQNQTSLTYSQGSLHRSVSQLMDIQDKKVLMDNSLWEAIMGHNSGLYVDEEDLMNAIKDFSSVTKERTTFTDTHL

SEQ ID NO: 307 - protein, 1546 aa, Artificial Sequence
  derived and/or modified protein sequence (wt) from Homo sapiens__ENST00000366942.3__USH2A
MNCPVLSLGSGFLFQVIEMLIFAYFASISLTESRGLFPRLENVGAFKKVSIVPTQAVCGLPDRSTFCHSSAAAESIQFCTQRFCIQDCPYRSSHPTYTALFSAGLSSCITPDKNDLHPNAHSNSASFIFGNHKSCFSSPPSPKLMASFTLAVWLKPEQQGVMCVIEKTVDGQIVFKLTISEKETMFYYRTVNGLQPPIKVMTLGRILVKKWIHLSVQVHQTKISFFINGVEKDHTPFNARTLSGSITDFASGTVQIGQSLNGLEQFVGRMQDFRLYQVALTNREILEVFSGDLLRLHAQSHCRCPGSHPRVHPLAQRYCIPNDAGDTADNRVSRLNPEAHPLSFVNDNDVGTSWVSNVFTNITQLNQGVTISVDLENGQYQVFYIIIQFFSPQPTEIRIQRKKENSLDWEDWQYFARNCGAFGMKNNGDLEKPDSVNCLQLSNFTPYSRGNVTFSILTPGPNYRPGYNNFYNTPSLQEFVKATQIRFHFHGQYYTTETAVNLRHRYYAVDEITISGRCQCHGHADNCDTTSQPYRCLCSQESFTEGLHCDRCLPLYNDKPFRQGDQVYAFNCKPCQCNSHSKSCHYNISVDPFPFEHFRGGGGVCDDCEHNTTGRNCELCKDYFFRQVGADPSAIDVCKPCDCDTVGTRNGSILCDQIGGQCNCKRHVSGRQCNQCQNGFYNLQELDPDGCSPCNCNTSGTVDGDITCHQNSGQCKCKANVIGLRCDHCNFGFKFLRSFNDVGCEPCQCNLHGSVNKFCNPHSGQCECKKEAKGLQCDTCRENFYGLDVTNCKACDCDTAGSLPGTVCNAKTGQCICKPNVEGRQCNKCLEGNFYLRQNNSFLCLPCNCDKTGTINGSLLCNKSTGQCPCKLGVTGLRCNQCEPHRYNLTIDNFQHCQMCECDSLGTLPGTICDPISGQCLCVPNRQGRRCNQCQPGFYISPGNATGCLPCSCHTTGAVNHICNSLTGQCVCQDASIAGQRCDQCKDHYFGFDPQTGRCQPCNCHLSGALNETCHLVTGQCFCKQFVTGSKCDACVPSASHLDVNNLLGCSKTPFQQPPPRGQVQSSSAINLSWSPPDSPNAHWLTYSLLRDGFEIYTTEDQYPYSIQYFLDTDLLPYTKYSYYIETTNVHGSTRSVAVTYKTKPGVPEGNLTLSYIIPIGSDSVTLTWTTLSNQSGPIEKYILSCAPLAGGQPCVSYEGHETSATIWNLVPFAKYDFSVQACTSGGCLHSLPITVTTAQAPPQRLSPPKMQKISSTELHVEWSPPAELNGIIIRYELYMRRLRSTKETTSEESRVFQSSGWLSPHSFVESANENALKPPQTMTTITGLEPYTKYEFRVLAVNMAGSVSSAWVSERTGESAPVFMIPPSVFPLSSYSLNISWEKPADNVTRGKVVGYDINMLSEQSPQQSIPMAFSQLLHTAKSQELSYTVEGLKPYRIYEFTITLCNSVGCVTSASGAGQTLAAAPAQLRPPLVKGINSTTIHLRWFPPEELNGPSPIYQLERRESSLPALMTTMMKGIRFIGNGYCKFPSSTHPVNTDFTGKCV

SEQ ID NO: 308 - protein, 412 aa, Artificial Sequence
  derived and/or modified protein sequence (wt) from Homo sapiens__ENST00000372055.8__VEGFA
MTDRQTDTAPSPSYHLLPGRRRTVDAAASRGQGPEPAPGGGVEGVGARGVALKLFVQLLGCSRFGGAVVRAGEAEPSGAARSASSGREEPQPEEGEEEEEKEEERGPQWRLGARKPGSWTGEAAVCADSAPAARAPQALARASGRGGRVARRGAEESGPPHSPSRRGSASRAGPGRASETMNFLLSWVHWSLALLLYLHHAKWSQAAPMAEGGGQNHHEVVKFMDVYQRSYCHPIETLVDIFQEYPDEIEYIFKPSCVPLMRCGGCCNDEGLECVPTEESNITMQIMRIKPHQGQHIGEMSFLQHNKCECRPKKDRARQEKKSVRGKGKGQKRKRKKSRYKSWSVYVGARCCLMPWSLPGPHPCGPCSERRKHLFVQDPQTCKCSCKNTDSRCKARQLELNERTCRCDKPRR

SEQ ID NO: 309 - protein, 395 aa, Artificial Sequence
  derived and/or modified protein sequence (wt) from Homo sapiens__ENST00000425836.6__VEGFA
MTDRQTDTAPSPSYHLLPGRRRTVDAAASRGQGPEPAPGGGVEGVGARGVALKLFVQLLGCSRFGGAVVRAGEAEPSGAARSASSGREEPQPEEGEEEEEKEEERGPQWRLGARKPGSWTGEAAVCADSAPAARAPQALARASGRGGRVARRGAEESGPPHSPSRRGSASRAGPGRASETMNFLLSWVHWSLALLLYLHHAKWSQAAPMAEGGGQNHHEVVKFMDVYQRSYCHPIETLVDIFQEYPDEIEYIFKPSCVPLMRCGGCCNDEGLECVPTEESNITMQIMRIKPHQGQHIGEMSFLQHNKCECRPKKDRARQEKKSVRGKGKGQKRKRKKSRYKSWSVPCGPCSERRKHLFVQDPQTCKCSCKNTDSRCKARQLELNERTCRCDKPRR

SEQ ID NO: 310 - protein, 389 aa, Artificial Sequence
  derived and/or modified protein sequence (wt) from Homo sapiens__ENST00000413642.7__VEGFA
MTDRQTDTAPSPSYHLLPGRRRTVDAAASRGQGPEPAPGGGVEGVGARGVALKLFVQLLGCSRFGGAVVRAGEAEPSGAARSASSGREEPQPEEGEEEEEKEEERGPQWRLGARKPGSWTGEAAVCADSAPAARAPQALARASGRGGRVARRGAEESGPPHSPSRRGSASRAGPGRASETMNFLLSWVHWSLALLLYLHHAKWSQAAPMAEGGGQNHHEVVKFMDVYQRSYCHPIETLVDIFQEYPDEIEYIFKPSCVPLMRCGGCCNDEGLECVPTEESNITMQIMRIKPHQGQHIGEMSFLQHNKCECRPKKDRARQEKKSVRGKGKGQKRKRKKSRPCGPCSERRKHLFVQDPQTCKCSCKNTDSRCKARQLELNERTCRCDKPRR

SEQ ID NO: 311 - protein, 371 aa, Artificial Sequence
  derived and/or modified protein sequence (wt) from Homo sapiens__ENST00000372067.7__VEGFA
MTDRQTDTAPSPSYHLLPGRRRTVDAAASRGQGPEPAPGGGVEGVGARGVALKLFVQLLGCSRFGGAVVRAGEAEPSGAARSASSGREEPQPEEGEEEEEKEEERGPQWRLGARKPGSWTGEAAVCADSAPAARAPQALARASGRGGRVARRGAEESGPPHSPSRRGSASRAGPGRASETMNFLLSWVHWSLALLLYLHHAKWSQAAPMAEGGGQNHHEVVKFMDVYQRSYCHPIETLVDIFQEYPDEIEYIFKPSCVPLMRCGGCCNDEGLECVPTEESNITMQIMRIKPHQGQHIGEMSFLQHNKCECRPKKDRARQENPCGPCSERRKHLFVQDPQTCKCSCKNTDSRCKARQLELNERTCRCDKPRR

SEQ ID NO: 312 - protein, 371 aa, Artificial Sequence
  derived and/or modified protein sequence (wt) from Homo sapiens__ENST00000482630.6__VEGFA
MTDRQTDTAPSPSYHLLPGRRRTVDAAASRGQGPEPAPGGGVEGVGARGVALKLFVQLLGCSRFGGAVVRAGEAEPSGAARSASSGREEPQPEEGEEEEEKEEERGPQWRLGARKPGSWTGEAAVCADSAPAARAPQALARASGRGGRVARRGAEESGPPHSPSRRGSASRAGPGRASETMNFLLSWVHWSLALLLYLHHAKWSQAAPMAEGGGQNHHEVVKFMDVYQRSYCHPIETLVDIFQEYPDEIEYIFKPSCVPLMRCGGCCNDEGLECVPTEESNITMQIMRIKPHQGQHIGEMSFLQHNKCECRPKKDRARQENPCGPCSERRKHLFVQDPQTCKCSCKNTDSRCKARQLELNERTCRSLTRKD

SEQ ID NO: 313 - protein, 354 aa, Artificial Sequence
  derived and/or modified protein sequence (wt) from Homo sapiens__ENST00000417285.6__VEGFA
MTDRQTDTAPSPSYHLLPGRRRTVDAAASRGQGPEPAPGGGVEGVGARGVALKLFVQLLGCSRFGGAVVRAGEAEPSGAARSASSGREEPQPEEGEEEEEKEEERGPQWRLGARKPGSWTGEAAVCADSAPAARAPQALARASGRGGRVARRGAEESGPPHSPSRRGSASRAGPGRASETMNFLLSWVHWSLALLLYLHHAKWSQAAPMAEGGGQNHHEVVKFMDVYQRSYCHPIETLVDIFQEYPDEIEYIFKPSCVPLMRCGGCCNDEGLECVPTEESNITMQIMRIKPHQGQHIGEMSFLQHNKCECRPKKDRARQENPCGPCSERRKHLFVQDPQTCKCSCKNTDSRCKM

SEQ ID NO: 314 - protein, 327 aa, Artificial Sequence
  derived and/or modified protein sequence (wt) from Homo sapiens__ENST00000372064.8__VEGFA
MTDRQTDTAPSPSYHLLPGRRRTVDAAASRGQGPEPAPGGGVEGVGARGVALKLFVQLLGCSRFGGAVVRAGEAEPSGAARSASSGREEPQPEEGEEEEEKEEERGPQWRLGARKPGSWTGEAAVCADSAPAARAPQALARASGRGGRVARRGAEESGPPHSPSRRGSASRAGPGRASETMNFLLSWVHWSLALLLYLHHAKWSQAAPMAEGGGQNHHEVVKFMDVYQRSYCHPIETLVDIFQEYPDEIEYIFKPSCVPLMRCGGCCNDEGLECVPTEESNITMQIMRIKPHQGQHIGEMSFLQHNKCECRPKKDRARQEKCDKPRR

SEQ ID NO: 315 - protein, 317 aa, Artificial Sequence
  derived and/or modified protein sequence (wt) from Homo sapiens__ENST00000324450.10__VEGFA
MTDRQTDTAPSPSYHLLPGRRRTVDAAASRGQGPEPAPGGGVEGVGARGVALKLFVQLLGCSRFGGAVVRAGEAEPSGAARSASSGREEPQPEEGEEEEEKEEERGPQWRLGARKPGSWTGEAAVCADSAPAARAPQALARASGRGGRVARRGAEESGPPHSPSRRGSASRAGPGRASETMNFLLSWVHWSLALLLYLHHAKWSQAAPMAEGGGQNHHEVVKFMDVYQRSYCHPIETLVDIFQEYPDEIEYIFKPSCVPLMRCGGCCNDEGLECVPTEESNITMQIMRIKPHQGQHIGEMSFLQHNKCECRCDKPRR

SEQ ID NO: 316 - protein, 232 aa, Artificial Sequence
  derived and/or modified protein sequence (wt) from Homo sapiens__ENST00000523873.5__VEGFA
MNFLLSWVHWSLALLLYLHHAKWSQAAPMAEGGGQNHHEVVKFMDVYQRSYCHPIETLVDIFQEYPDEIEYIFKPSCVPLMRCGGCCNDEGLECVPTEESNITMQIMRIKPHQGQHIGEMSFLQHNKCECRPKKDRARQEKKSVRGKGKGQKRKRKKSRYKSWSVYVGARCCLMPWSLPGPHPCGPCSERRKHLFVQDPQTCKCSCKNTDSRCKARQLELNERTCRCDKPRR

SEQ ID NO: 317 - protein, 215 aa, Artificial Sequence
  derived and/or modified protein sequence (wt) from Homo sapiens__ENST00000520948.5__VEGFA
MNFLLSWVHWSLALLLYLHHAKWSQAAPMAEGGGQNHHEVVKFMDVYQRSYCHPIETLVDIFQEYPDEIEYIFKPSCVPLMRCGGCCNDEGLECVPTEESNITMQIMRIKPHQGQHIGEMSFLQHNKCECRPKKDRARQEKKSVRGKGKGQKRKRKKSRYKSWSVPCGPCSERRKHLFVQDPQTCKCSCKNTDSRCKARQLELNERTCRCDKPRR

SEQ ID NO: 318 - protein, 209 aa, Artificial Sequence
  derived and/or modified protein sequence (wt) from Homo sapiens__ENST00000518689.5__VEGFA
MNFLLSWVHWSLALLLYLHHAKWSQAAPMAEGGGQNHHEVVKFMDVYQRSYCHPIETLVDIFQEYPDEIEYIFKPSCVPLMRCGGCCNDEGLECVPTEESNITMQIMRIKPHQGQHIGEMSFLQHNKCECRPKKDRARQEKKSVRGKGKGQKRKRKKSRPCGPCSERRKHLFVQDPQTCKCSCKNTDSRCKARQLELNERTCRCDKPRR

SEQ ID NO: 319 - protein, 191 aa, Artificial Sequence
  derived and/or modified protein sequence (wt) from Homo sapiens__ENST00000523950.5__VEGFA-isoVEGF165
MNFLLSWVHWSLALLLYLHHAKWSQAAPMAEGGGQNHHEVVKFMDVYQRSYCHPIETLVDIFQEYPDEIEYIFKPSCVPLMRCGGCCNDEGLECVPTEESNITMQIMRIKPHQGQHIGEMSFLQHNKCECRPKKDRARQENPCGPCSERRKHLFVQDPQTCKCSCKNTDSRCKARQLELNERTCRCDKPRR

SEQ ID NO: 320 - protein, 191 aa, Artificial Sequence
  derived and/or modified protein sequence (wt) from Homo sapiens__ENST00000518824.5__VEGFA-isoVEGF165B
MNFLLSWVHWSLALLLYLHHAKWSQAAPMAEGGGQNHHEVVKFMDVYQRSYCHPIETLVDIFQEYPDEIEYIFKPSCVPLMRCGGCCNDEGLECVPTEESNITMQIMRIKPHQGQHIGEMSFLQHNKCECRPKKDRARQENPCGPCSERRKHLFVQDPQTCKCSCKNTDSRCKARQLELNERTCRSLTRKD

SEQ ID NO: 321 - protein, 174 aa, Artificial Sequence
  derived and/or modified protein sequence (wt) from Homo sapiens__ENST00000523125.5__VEGFA
MNFLLSWVHWSLALLLYLHHAKWSQAAPMAEGGGQNHHEVVKFMDVYQRSYCHPIETLVDIFQEYPDEIEYIFKPSCVPLMRCGGCCNDEGLECVPTEESNITMQIMRIKPHQGQHIGEMSFLQHNKCECRPKKDRARQENPCGPCSERRKHLFVQDPQTCKCSCKNTDSRCKM

SEQ ID NO: 322 - protein, 163 aa, Artificial Sequence
  derived and/or modified protein sequence (wt) from Homo sapiens__ENST00000230480.10__VEGFA
MAEGGGQNHHEVVKFMDVYQRSYCHPIETLVDIFQEYPDEIEYIFKPSCVPLMRCGGCCNDEGLECVPTEESNITMQIMRIKPHQGQHIGEMSFLQHNKCECRPKKDRARQENPCGPCSERRKHLFVQDPQTCKCSCKNTDSRCKARQLELNERTCRCDKPRR

SEQ ID NO: 323 - protein, 147 aa, Artificial Sequence
  derived and/or modified protein sequence (wt) from Homo sapiens__ENST00000372077.8__VEGFA
MNFLLSWVHWSLALLLYLHHAKWSQAAPMAEGGGQNHHEVVKFMDVYQRSYCHPIETLVDIFQEYPDEIEYIFKPSCVPLMRCGGCCNDEGLECVPTEESNITMQIMRIKPHQGQHIGEMSFLQHNKCECRPKKDRARQEKCDKPRR

SEQ ID NO: 324 - protein, 137 aa, Artificial Sequence
  derived and/or modified protein sequence (wt) from Homo sapiens__ENST00000457104.6__VEGFA
MNFLLSWVHWSLALLLYLHHAKWSQAAPMAEGGGQNHHEVVKFMDVYQRSYCHPIETLVDIFQEYPDEIEYIFKPSCVPLMRCGGCCNDEGLECVPTEESNITMQIMRIKPHQGQHIGEMSFLQHNKCECRCDKPRR

SEQ ID NO: 325 - protein, 207 aa, Artificial Sequence
  derived and/or modified protein sequence (wt) from Homo sapiens__ENST00000309422.6__VEGFB
MSPLLRRLLLAALLQLAPAQAPVSQPDAPGHQRKVVSWIDVYTRATCQPREVVVPLTVELMGTVAKQLVPSCVTVQRCGGCCPDDGLECVPTGQHQVRMQILMIRYPSSQLGEMSLEEHSQCECRPKKKDSAVKPDRAATPHHRPQPRSVPGWDSAPGAPSPADITHPTPAPGPSAHAAPSTTSALTPGPAAAAADAAASSVAKGGA

SEQ ID NO: 326 - protein, 188 aa, Artificial Sequence
  derived and/or modified protein sequence (wt) from Homo sapiens__ENST00000426086.2__VEGFB
MSPLLRRLLLAALLQLAPAQAPVSQPDAPGHQRKVVSWIDVYTRATCQPREVVVPLTVELMGTVAKQLVPSCVTVQRCGGCCPDDGLECVPTGQHQVRMQILMIRYPSSQLGEMSLEEHSQCECRPKKKDSAVKPDSPRPLCPRCTQHHQRPDPRTCRCRCRRRSFLRCQGRGLELNPDTCRCRKLRR

SEQ ID NO: 327 - protein, 419 aa, Artificial Sequence
  derived and/or modified protein sequence (wt) from Homo sapiens__ENST00000618562.1__VEGFC
MHLLGFFSVACSLLAAALLPGPREAPAAAAAFESGLDLSDAEPDAGEATAYASKDLEEQLRSVSSVDELMTVLYPEYWKMYKCQLRKGGWQHNREQANLNSRTEETIKFAAAHYNTEILKSIDNEWRKTQCMPREVCIDVGKEFGVATNTFFKPPCVSVYRCGGCCNSEGLQCMNTSTSYLSKTLFEITVPLSQGPKPVTISFANHTSCRCMSKLDVYRQVHSIIRRSLPATLPQCQAANKTCPTNYMWNNHICRCLAQEDFMFSSDAGDDSTDGFHDICGPNKELDEETCQCVCRAGLRPASCGPHKELDRNSCQCVCKNKLFPSQCGANREFDENTCQCVCKRTCPRNQPLNPGKCACECTESPQKCLLKGKKFHHQTCSCYRRPCTNRQKACEPGFSYSEEVCRCVPSYWKRPQMS

SEQ ID NO: 328 - protein, 354 aa, Artificial Sequence
  derived and/or modified protein sequence (wt) from Homo sapiens__ENST00000297904.3__VEGFD
MYREWVVVNVFMMLYVQLVQGSSNEHGPVKRSSQSTLERSEQQIRAASSLEELLRITHSEDWKLWRCRLRLKSFTSMDSRSASHRSTRFAATFYDIETLKVIDEEWQRTQCSPRETCVEVASELGKSTNTFFKPPCVNVFRCGGCCNEESLICMNTSTSYISKQLFEISVPLTSVPELVPVKVANHTGCKCLPTAPRHPYSIIRRSIQIPEEDRCSHSKKLCPIDMLWDSNKCKCVLQEENPLAGTEDHSHLQEPALCGPHMMFDEDRCECVCKTPCPKDLIQHPKNCSCFECKESLETCCQKHKLFHPDTCSCEDRCPFHTRPCASGKTACAKHCRFPKEKRAAQGPHSRKNP

SEQ ID NO: 329 - protein, 890 aa, Artificial Sequence
  derived and/or modified protein sequence (wt) from Homo sapiens__ENST00000226760.5__WFS1
MDSNTAPLGPSCPQPPPAPQPQARSRLNATASLEQERSERPRAPGPQAGPGPGVRDAAAPAEPQAQHTRSRERADGTGPTKGDMEIPFEEVLERAKAGDPKAQTEVGKHYLQLAGDTDEELNSCTAVDWLVLAAKQGRREAVKLLRRCLADRRGITSENEREVRQLSSETDLERAVRKAALVMYWKLNPKKKKQVAVAELLENVGQVNEHDGGAQPGPVPKSLQKQRRMLERLVSSESKNYIALDDFVEITKKYAKGVIPSSLFLQDDEDDDELAGKSPEDLPLRLKVVKYPLHAIMEIKEYLIDMASRAGMHWLSTIIPTHHINALIFFFIVSNLTIDFFAFFIPLVIFYLSFISMVICTLKVFQDSKAWENFRTLTDLLLRFEPNLDVEQAEVNFGWNHLEPYAHFLLSVFFVIFSFPIASKDCIPCSELAVITGFFTVTSYLSLSTHAEPYTRRALATEVTAGLLSLLPSMPLNWPYLKVLGQTFITVPVGHLVVLNVSVPCLLYVYLLYLFFRMAQLRNFKGTYCYLVPYLVCFMWCELSVVILLESTGLGLLRASIGYFLFLFALPILVAGLALVGVLQFARWFTSLELTKIAVTVAVCSVPLLLRWWTKASFSVVGMVKSLTRSSMVKLILVWLTAIVLFCWFYVYRSEGMKVYNSTLTWQQYGALCGPRAWKETNMARTQILCSHLEGHRVTWTGRFKYVRVTDIDNSAESAINMLPFFIGDWMRCLYGEAYPACSPGNTSTAEEELCRLKLLAKHPCHIKKFDRYKFEITVGMPFSSGADGSRSREEDDVTKDIVLRASSEFKSVLLSLRQGSLIEFSTILEGRLGSKWPVFELKAISCLNCMAQLSPTRRHVKIEHDWRSTVHGAVKFAFDFFFFPFLSAA

SEQ ID NO: 330 - protein, 431 aa, Artificial Sequence
  derived and/or modified protein sequence (artificial) from Artificial____aflibercept
SDTGRPFVEMYSEIPEIIHMTEGRELVIPCRVTSPNITVTLKKFPLDTLIPDGKRIIWDSRKGFIISNATYKEIGLLTCEATVNGHLYKTNYLTHRQTNTIIDVVLSPSHGIELSVGEKLVLNCTARTELNVGIDFNWEYPSSKHQHKKLVNRDLKTQSGSEMKKFLSTLTIDGVTRSDQGLYTCAASSGLMTKKNSTFVRVHEKDKTHTCPPCPAPELLGGPSVFLFPPKPKDTLMISRTPEVTCVVVDVSHEDPEVKFNWYVDGVEVHNAKTKPREEQYNSTYRVVSVLTVLHQDWLNGKEYKCKVSNKALPAPIEKTISKAKGQPREPQVYTLPPSRDELTKNQVSLTCLVKGFYPSDIAVEWESNGQPENNYKTTPPVLDSDGSFFLYSKLTVDKSRWQQGNVFSCSVMHEALHNHYTQKSLSLSPG

SEQ ID NO: 331 - protein, 467 aa, Artificial Sequence
  derived and/or modified protein sequence (artificial) from Artificial____etanercept
LPAQVAFTPYAPEPGSTCRLREYYDQTAQMCCSKCSPGQHAKVFCTKTSDTVCDSCEDSTYTQLWNWVPECLSCGSRCSSDQVETQACTREQNRICTCRPGWYCALSKQEGCRLCAPLRKCRPGFGVARPGTETSDVVCKPCAPGTFSNTTSSTDICRPHQICNVVAIPGNASMDAVCTSTSPTRSMAPGAVHLPQPVSTRSQHTQPTPEPSTAPSTSFLLPMGPSPPAEGSTGDEPKSCDKTHTCPPCPAPELLGGPSVFLFPPKPKDTLMISRTPEVTCVVVDVSHEDPEVKFNWYVDGVEVHNAKTKPREEQYNSTYRVVSVLTVLHQDWLNGKEYKCKVSNKALPAPIEKTISKAKGQPREPQVYTLPPSREEMTKNQVSLTCLVKGFYPSDIAVEWESNGQPENNYKTTPPVLDSDGSFFLYSKLTVDKSRWQQGNVFSCSVMHEALHNHYTQKSLSLSPGK

SEQ ID NO: 332 - protein, 214 aa, Artificial Sequence
  derived and/or modified protein sequence (artificial) from Artificial____bevacizumab-LC
DIQMTQSPSSLSASVGDRVTITCSASQDISNYLNWYQQKPGKAPKVLIYFTSSLHSGVPSRFSGSGSGTDFTLTISSLQPEDFATYYCQQYSTVPWTFGQGTKVEIKRTVAAPSVFIFPPSDEQLKSGTASVVCLLNNFYPREAKVQWKVDNALQSGNSQESVTEQDSKDSTYSLSSTLTLSKADYEKHKVYACEVTHQGLSSPVTKSFNRGEC

SEQ ID NO: 333 - protein, 453 aa, Artificial Sequence
  derived and/or modified protein sequence (artificial) from Artificial____bevacizumab-HC
EVQLVESGGGLVQPGGSLRLSCAASGYTFTNYGMNWVRQAPGKGLEWVGWINTYTGEPTYAADFKRRFTFSLDTSKSTAYLQMNSLRAEDTAVYYCAKYPHYYGSSHWYFDVWGQGTLVTVSSASTKGPSVFPLAPSSKSTSGGTAALGCLVKDYFPEPVTVSWNSGALTSGVHTFPAVLQSSGLYSLSSVVTVPSSSLGTQTYICNVNHKPSNTKVDKKVEPKSCDKTHTCPPCPAPELLGGPSVFLFPPKPKDTLMISRTPEVTCVVVDVSHEDPEVKFNWYVDGVEVHNAKTKPREEQYNSTYRVVSVLTVLHQDWLNGKEYKCKVSNKALPAPIEKTISKAKGQPREPQVYTLPPSREEMTKNQVSLTCLVKGFYPSDIAVEWESNGQPENNYKTTPPVLDSDGSFFLYSKLTVDKSRWQQGNVFSCSVMHEALHNHYTQKSLSLSPGK

SEQ ID NO: 334 - protein, 674 aa, Artificial Sequence
  derived and/or modified protein sequence (artificial) from Artificial____bevacizumab-RKR
DIQMTQSPSSLSASVGDRVTITCSASQDISNYLNWYQQKPGKAPKVLIYFTSSLHSGVPSRFSGSGSGTDFTLTISSLQPEDFATYYCQQYSTVPWTFGQGTKVEIKRTVAAPSVFIFPPSDEQLKSGTASVVCLLNNFYPREAKVQWKVDNALQSGNSQESVTEEDSKDSTYSLSSTLTLSKADYEKHKVYACEVTHQGLSSPVTKSFNRGECGGGSRKREVQLVESGGGLVQPGGSLRLSCAASGYTFTNYGMNWVRQAPGKGLEWVGWINTYTGEPTYAADFKRRFTFSLDTSKSTAYLQMNSLRAEDTAVYYCAKYPHYYGSSHWYFDVWGQGTLVTVSSASTKGPSVFPLAPSSKSTSGGTAALGCLVKDYFPEPVTVSWNSGALTSGVHTFPAVLQSSGLYSLSSVVTVPSSSLGTQTYICNVNHKPSNTKVDKKVEPKSCDKTHTCPPCPAPELLGGPSVFLFPPKPKDTLMISRTPEVTCVVVDVSHEDPEVKFNWYVDGVEVHNAKTKPREEQYNSTYRVVSVLTVLHQDWLNGKEYKCKVSNKALPAPIEKTISKAKGQPREPQVYTLPPSREEMTKNQVSLTCLVKGFYPSDIAVEWESNGQPENNYKTTPPVLDSDGSFFLYSKLTVDKSRWQQGNVFSCSVMHEALHNHYTQKSLSLSPGK

SEQ ID NO: 335 - protein, 214 aa, Artificial Sequence
  derived and/or modified protein sequence (artificial) from Artificial____ranibizumab-LC
DIQLTQSPSSLSASVGDRVTITCSASQDISNYLNWYQQKPGKAPKVLIYFTSSLHSGVPSRFSGSGSGTDFTLTISSLQPEDFATYYCQQYSTVPWTFGQGTKVEIKRTVAAPSVFIFPPSDEQLKSGTASVVCLLNNFYPREAKVQWKVDNALQSGNSQESVTEQDSKDSTYSLSSTLTLSKADYEKHKVYACEVTHQGLSSPVTKSFNRGEC

SEQ ID NO: 336 - protein, 231 aa, Artificial Sequence
  derived and/or modified protein sequence (artificial) from Artificial____ranibizumab-HC
EVQLVESGGGLVQPGGSLRLSCAASGYDFTHYGMNWVRQAPGKGLEWVGWINTYTGEPTYAADFKRRFTFSLDTSKSTAYLQMNSLRAEDTAVYYCAKYPYYYGTSHWYFDVWGQGTLVTVSSASTKGPSVFPLAPSSKSTSGGTAALGCLVKDYFPEPVTVSWNSGALTSGVHTFPAVLQSSGLYSLSSVVTVPSSSLGTQTYICNVNHKPSNTKVDKKVEPKSCDKTHL

SEQ ID NO: 337 - protein, 442 aa, Artificial Sequence
  derived and/or modified protein sequence (artificial) from Artificial____ranibizumab-RKR
DIQLTQSPSSLSASVGDRVTITCSASQDISNYLNWYQQKPGKAPKVLIYFTSSLHSGVPSRFSGSGSGTDFTLTISSLQPEDFATYYCQQYSTVPWTFGQGTKVEIKRTVAAPSVFIFPPSDEQLKSGTASVVCLLNNFYPREAKVQWKVDNALQSGNSQESVTEQDSKDSTYSLSSTLTLSKADYEKHKVYACEVTHQGLSSPVTKSFNRGEGGGSRKRGGGSEVQLVESGGGLVQPGGSLRLSCAASGYDFTHYGMNWVRQAPGKGLEWVGWINTYTGEPTYAADFKRRFTFSLDTSKSTAYLQMNSLRAEDTAVYYCAKYPYYYGTSHWYFDVWGQGTLVTVSSASTKGPSVFPLAPSGTAALGCLVKDYFPEPVTVSWNSGALTSGVHTFPAVLQSSGLYSLSSVVTVPSSSLGTQTYICNVNHKPSNTKVDKKVEPK

SEQ ID NO: 338 - protein, 215 aa, Artificial Sequence
  derived and/or modified protein sequence (artificial) from Artificial____anti-CCL11-LC
DIQMTQSPSSVSASVGDRVTITCRASQDISSWLAWYQQKPGKAPKLLIYAASSLQSGVPSRFSGSGSGTDFTLTISSLQPEDFATYYCQQASSFPSITFGQGTRLEIKRGQPKAAPSVTLFPPSSEELQANKATLVCLISDFYPGAVTVAWKADSSPVKAGVETTTPSKQSNNKYAASSYLSLTPEQWKSHRSYSCQVTHEGSTVEKTVAPTECS

SEQ ID NO: 339 - protein, 445 aa, Artificial Sequence
  derived and/or modified protein sequence (artificial) from Artificial____anti-CCL11-HC
QVQLVQSGGGVVQPGRSLRLSCAASGFTFSSYGMHWVRQAPGKGLEWVAVISYDGSIKHYADSVKGRFTISRDNSKNTLYLQMNSLRTDDTAVYYCAGDTDYGDIDPWGQGTMVTVSSASTKGPSVFPLAPCSRSTSESTAALGCLVKDYFPEPVTVSWNSGALTSGVHTFPAVLQSSGLYSLSSVVTVPSSSLGTKTYTCNVDHKPSNTKVDKRVESKYGPPCPSCPAPEFLGGPSVFLFPPKPKDTLMISRTPEVTCVVVDVSQEDPEVQFNWYVDGVEVHNAKTKPREEQFNSTYRVVSVLTVLHQDWLNGKEYKCKVSNKGLPSSIEKTISKAKGQPREPQVYTLPPSQEEMTKNQVSLTCLVKGFYPSDIAVEWESNGQPENNYKTTPPVLDSDGSFFLYSRLTVDKSRWQEGNVFSCSVMHEALHNHYTQKSLSLSPGK

SEQ ID NO: 340 - protein, 212 aa, Artificial Sequence
  derived and/or modified protein sequence (artificial) from Artificial____anti-PDGFB-LC
ELQLTQSPSSLSASVGDRVTITCTASSSVRYMHWYQQKPGKAPKLLIYSASNLASGVPSRFSGSGSGTDYTLTISSLEPEDVATYYCQQRSSPWTFGGGTKLEIKRTVAAPSVFIFPPSDEQLKSGTASVVCLLNNFYPREAKVQWKVDNALQSGNSQESVTEQDSKDSTYSLSSTLTLSKADYEKHKVYACEVTHQGLSSPVTKSFNRGEC

SEQ ID NO: 341 - protein, 445 aa, Artificial Sequence
  derived and/or modified protein sequence (artificial) from Artificial____anti-PDGFB-HC
ESGAEVKKPGASVKVSCKASGYTFTSTWMNWVKQTPDQGLEWIGRIDPYDSEAHYNQKFKDRVTMTVDTSISTAYMELSRLRSEDTAVYYCARGGHMITPAMDYWGQGTLVTVSSASTKGPSVFPLAPSSKSTSGGTAALGCLVKDYFPEPVTVSWNSGALTSGVHTFPAVLQSSGLYSLSSVVTVPSSSLGTQTYICNVNHKPSNTKVDKKVEPKSCDKTHTCPPCPAPELLGGPSVFLFPPKPKDTLMISRTPEVTCVVVDVSHEDPEVKFNWYVDGVEVHNAKTKPREEQYNSTYRVVSVLTVLHQDWLNGKEYKCKVSNKALPAPIEKTISKAKGQPREPQVYTLPPSRDELTKNQVSLTCLVKGFYPSDIAVEWESNGQPENNYKTTPPVLDSDGSFFLYSKLTVDKSRWQQGNVFSCSVMHEALHNHYTQKSLSLSPGK

SEQ ID NO: 342 - protein, 445 aa, Artificial Sequence
  derived and/or modified protein sequence (artificial) from Artificial____anti-PDGFA-LC
ESGAEVKKPGASVKVSCKASGYTFTSTWMNWVRQTPDQGLEWIGRIDPYDSAEHYNQKFKDRVTMTVDKSISTAYMQLSRLRSEDTAVYYCARGGHMITPAMDYWGQGTLVTVSSASTKGPSVFPLAPSSKSTSGGTAALGCLVKDYFPEPVTVSWNSGALTSGVHTFPAVLQSSGLYSLSSVVTVPSSSLGTQTYICNVNHKPSNTKVDKKVEPKSCDKTHTCPPCPAPELLGGPSVFLFPPKPKDTLMISRTPEVTCVVVDVSHEDPEVKFNWYVDGVEVHNAKTKPREEQYNSTYRVVSVLTVLHQDWLNGKEYKCKVSNKALPAPIEKTISKAKGQPREPQVYTLPPSRDELTKNQVSLTCLVKGFYPSDIAVEWESNGQPENNYKTTPPVLDSDGSFFLYSKLTVDKSRWQQGNVFSCSVMHEALHNHYTQKSLSLSPGK

SEQ ID NO: 343 - protein, 213 aa, Artificial Sequence
  derived and/or modified protein sequence (artificial) from Artificial____anti-PDGFA-HC
ELQLTQSPSSLSASVGDRVTITCTASSSVRYMHWYQQKPGKAPKLLIYSTSNLASGVPSRFSGSGSGTDYTLTISSLEPEDVATYYCQQRSKLPWTFGGGTKLEIKRTVAAPSVFIFPPSDEQLKSGTASVVCLLNNFYPREAKVQWKVDNALQSGNSQESVTEQDSKDSTYSLSSTLTLSKADYEKHKVYACEVTHQGLSSPVTKSFNRGEC

SEQ ID NO: 344 - protein, 217 aa, Artificial Sequence
  derived and/or modified protein sequence (artificial) from Artificial____bersanlimab-LC
QSVLTQPPSASGTPGQRVTISCTGSSSNIGAGYDVHWYQQLPGTAPKLLIYDNNNRPSGVPDRFSGSKSGTSASLAISGLRSEDEADYYCQSYDSSLSAWLFGGGTKLTVLGQPKAAPSVTLFPPSSEELQANKATLVCLISDFYPGAVTVAWKADSSPVKAGVETTTPSKQSNNKYAASSYLSLTPEQWKSHRSYSCQVTHEGSTVEKTVAPTECS

SEQ ID NO: 345 - protein, 447 aa, Artificial Sequence
  derived and/or modified protein sequence (artificial) from Artificial____bersanlimab-HC
EVQLLESGGGLVQPGGSLRLSCAASGFTFSNAWMSWVRQAPGKGLEWVAFIWYDGSNKYYADSVKGRFTISRDNSKNTLYLQMNSLRAEDTAVYYCARYSGWYFDYWGQGTLVTVSSASTKGPSVFPLAPSSKSTSGGTAALGCLVKDYFPEPVTVSWNSGALTSGVHTFPAVLQSSGLYSLSSVVTVPSSSLGTQTYICNVNHKPSNTKVDKKVEPKSCDKTHTCPPCPAPELLGGPSVFLFPPKPKDTLMISRTPEVTCVVVDVSHEDPEVKFNWYVDGVEVHNAKTKPREEQYNSTYRVVSVLTVLHQDWLNGKEYKCKVSNKALPAPIEKTISKAKGQPREPQVYTLPPSRDELTKNQVSLTCLVKGFYPSDIAVEWESNGQPENNYKTTPPVLDSDGSFFLYSKLTVDKSRWQQGNVFSCSVMHEALHNHYTQKSLSLSPGK

SEQ ID NO: 346 - protein, 217 aa, Artificial Sequence
  derived and/or modified protein sequence (artificial) from Artificial____clazakizumab-LC
AIQMTQSPSSLSASVGDRVTITCQASQSINNELSWYQQKPGKAPKLLIYRASTLASGVPSRFSGSGSGTDFTLTISSLQPDDFATYYCQQGYSLRNIDNAFGGGTKVEIKRTVAAPSVFIFPPSDEQLKSGTASVVCLLNNFYPREAKVQWKVDNALQSGNSQESVTEQDSKDSTYSLSSTLTLSKADYEKHKVYACEVTHQGLSSPVTKSFNRGEC

SEQ ID NO: 347 - protein, 450 aa, Artificial Sequence
  derived and/or modified protein sequence (artificial) from Artificial____clazakizumab-HC
EVQLVESGGGLVQPGGSLRLSCAASGFSLSNYYVTWVRQAPGKGLEWVGIIYGSDETAYATSAIGRFTISRDNSKNTLYLQMNSLRAEDTAVYYCARDDSSDWDAKFNLWGQGTLVTVSSASTKGPSVFPLAPSSKSTSGGTAALGCLVKDYFPEPVTVSWNSGALTSGVHTFPAVLQSSGLYSLSSVVTVPSSSLGTQTYICNVNHKPSNTKVDKRVEPKSCDKTHTCPPCPAPELLGGPSVFLFPPKPKDTLMISRTPEVTCVVVDVSHEDPEVKFNWYVDGVEVHNAKTKPREEQYASTYRVVSVLTVLHQDWLNGKEYKCKVSNKALPAPIEKTISKAKGQPREPQVYTLPPSREEMTKNQVSLTCLVKGFYPSDIAVEWESNGQPENNYKTTPPVLDSDGSFFLYSKLTVDKSRWQQGNVFSCSVMHEALHNHYTQKSLSLSPGK

SEQ ID NO: 348 - protein, 214 aa, Artificial Sequence
  derived and/or modified protein sequence (artificial) from Artificial____olokizumab-LC
DIQMTQSPSSLSASVGDRVTITCQASQDIGISLSWYQQKPGKAPKLLIYNANNLADGVPSRFSGSGSGTDFTLTISSLQPEDFATYYCLQHNSAPYTFGQGTKLEIKRTVAAPSVFIFPPSDEQLKSGTASVVCLLNNFYPREAKVQWKVDNALQSGNSQESVTEQDSKDSTYSLSSTLTLSKADYEKHKVYACEVTHQGLSSPVTKSFNRGEC

SEQ ID NO: 349 - protein, 447 aa, Artificial Sequence
  derived and/or modified protein sequence (artificial) from Artificial____olokizumab-HC
EVQLVESGGGLVQPGGSLRLSCAASGFNFNDYFMNWVRQAPGKGLEWVAQMRNKNYQYGTYYAESLEGRFTISRDDSKNSLYLQMNSLKTEDTAVYYCARESYYGFTSYWGQGTLVTVSSASTKGPSVFPLAPCSRSTSESTAALGCLVKDYFPEPVTVSWNSGALTSGVHTFPAVLQSSGLYSLSSVVTVPSSSLGTKTYTCNVDHKPSNTKVDKRVESKYGPPCPPCPAPEFLGGPSVFLFPPKPKDTLMISRTPEVTCVVVDVSQEDPEVQFNWYVDGVEVHNAKTKPREEQFNSTYRVVSVLTVLHQDWLNGKEYKCKVSNKGLPSSIEKTISKAKGQPREPQVYTLPPSQEEMTKNQVSLTCLVKGFYPSDIAVEWESNGQPENNYKTTPPVLDSDGSFFLYSRLTVDKSRWQEGNVFSCSVMHEALHNHYTQKSLSLSLGK

SEQ ID NO: 350 - protein, 214 aa, Artificial Sequence
  derived and/or modified protein sequence (artificial) from Artificial____sarilumab-LC
DIQMTQSPSSVSASVGDRVTITCRASQGISSWLAWYQQKPGKAPKLLIYGASSLESGVPSRFSGSGSGTDFTLTISSLQPEDFASYYCQQANSFPYTFGQGTKLEIKRTVAAPSVFIFPPSDEQLKSGTASVVCLLNNFYPREAKVQWKVDNALQSGNSQESVTEQDSKDSTYSLSSTLTLSKADYEKHKVYACEVTHQGLSSPVTKSFNRGEC

SEQ ID NO: 351 - protein, 446 aa, Artificial Sequence
  derived and/or modified protein sequence (artificial) from Artificial____sarilumab-HC
EVQLVESGGGLVQPGRSLRLSCAASRFTFDDYAMHWVRQAPGKGLEWVSGISWNSGRIGYADSVKGRFTISRDNAENSLFLQMNGLRAEDTALYYCAKGRDSFDIWGQGTMVTVSSASTKGPSVFPLAPSSKSTSGGTAALGCLVKDYFPEPVTVSWNSGALTSGVHTFPAVLQSSGLYSLSSVVTVPSSSLGTQTYICNVNHKPSNTKVDKKVEPKSCDKTHTCPPCPAPELLGGPSVFLFPPKPKDTLMISRTPEVTCVVVDVSHEDPEVKFNWYVDGVEVHNAKTKPREEQYNSTYRVVSVLTVLHQDWLNGKEYKCKVSNKALPAPIEKTISKAKGQPREPQVTYLPPSRDELTKNQVSLTCLVKGFYPSDIAVEWESNGQPENNYKTTPPVLDSDGSFFLYSKLTVDKSRWQQGNVFSCSVMHEALHNHYTQKSLSLSPGK

SEQ ID NO: 352 - protein, 213 aa, Artificial Sequence
  derived and/or modified protein sequence (artificial) from Artificial____siltuximab-LC
QIVLIQSPAIMSASPGEKVTMTCSASSSVSYMYWYQQKPGSSPRLLIYDTSNLASGVPVRFSGSGSGTSYSLTISRMEAEDAATYYCQQWSGYPYTFGGGTKLEIKRTVAAPSVFIFPPSDEQLKSGTASVVCLLNNFYPREAKVQWKVDNALQSGNSQESVTEQDSKDSTYSLSSTLTLSKADYEKHKVYACEVTHQGLSSPVTKSFNRGEC

SEQ ID NO: 353 - protein, 449 aa, Artificial Sequence
  derived and/or modified protein sequence (artificial) from Artificial____siltuximab-HC
EVQLVESGGKLLKPGGSLKLSCAASGFTFSSFAMSWFRQSPEKRLEWVAEISSGGSYTYYPDTVTGRFTISRDNAKNTLYLEMSSLRSEDTAMYYCARGLWGYYALDYWGQGTSVTVSSASTKGPSVFPLAPSSKSTSGGTAALGCLVKDYFPEPVTVSWNSGALTSGVHTFPAVLQSSGLYSLSSVVTVPSSSLGTQTYICNVNHKPSNTKVDKKVEPKSCDKTHTCPPCPAPELLGGPSVFLFPPKPKDTLMISRTPEVTCVVVDVSHEDPEVKFNWYVDGVEVHNAKTKPREEQYNSTYRVVSVLTVLHQDWLNGKEYKCKVSNKALPAPIEKTISKAKGQPREPQVYTLPPSRDELTKNQVSLTCLVKGFYPSDIAVEWESNGQPENNYKTTPPVLDSDGSFFLYSKLTVDKSRWQQGNVFSCSVMHEALHNHYTQKSLSLSPGK

SEQ ID NO: 354 - protein, 213 aa, Artificial Sequence
  derived and/or modified protein sequence (artificial) from Artificial____sirukumab-LC
EIVLTQSPATLSLSPGERATLSCSASISVSYMYWYQQKPGQAPRLLIYDMSNLASGIPARFSGSGSGTDFTLTISSLEPEDFAVYYCMQWSGYPYTFGGGTKVEIKRTVAAPSVFIFPPSDEQLKSGTASVVCLLNNFYPREAKVQWKVDNALQSGNSQESVTEQDSKDSTYSLSSTLTLSKADYEKHKVYACEVTHQGLSSPVTKSFNRGEC

SEQ ID NO: 355 - protein, 449 aa, Artificial Sequence
  derived and/or modified protein sequence (artificial) from Artificial____sirukumab-HC
EVQLVESGGGLVQPGGSLRLSCAASGFTFSPFAMSWVRQAPGKGLEWVAKISPGGSWTYYSDTVTGRFTISRDNAKNSLYLQMNSLRAEDTAVYYCARQLWGYYALDIWGQGTTVTVSSASTKGPSVFPLAPSSKSTSGGTAALGCLVKDYFPEPVTVSWNSGALTSGVHTFPAVLQSSGLYSLSSVVTVPSSSLGTQTYICNVNHKPSNTKVDKKVEPKSCDKTHTCPPCPAPELLGGPSVFLFPPKPKDTLMISRTPEVTCVVVDVSHEDPEVKFNWYVDGVEVHNAKTKPREEQYNSTYRVVSVLTVLHQDWLNGKEYKCKVSNKALPAPIEKTISKAKGQPREPQVYTLPPSRDELTKNQVSLTCLVKGFYPSDIAVEWESNGQPENNYKTTPPVLDSDGSFFLYSKLTVDKSRWQQGNVFSCSVMHEALHNHYTQKSLSLSPGK

SEQ ID NO: 356 - protein, 960 aa, Artificial Sequence
  derived and/or modified protein sequence (artificial) from Artificial____DPP4-Fc
SRKTYTLTDYLKNTYRLKLYSLRWISDHEYLYKQENNILVFNAEYGNSSVFLENSTFDEFGHSINDYSISPDGQFILLEYNYVKQWRHSYTASYDIYDLNKRQLITEERIPNNTQWVTWSPVGHKLAYVWNNDIYVKIEPNLPSYRITWTGKEDIIYNGITDWVYEEEVFSAYSALWWSPNGTFLAYAQFNDTEVPLIEYSFYSDESLQYPKTVRVPYPKAGAVNPTVKFFVVNTDSLSSVTNATSIQITAPASMLIGDHYLCDVTWATQERISLQWLRRIQNYSVMDICDYDESSGRWNCLVARQHIEMSTTGWVGRFRPSEPHFTLDGNSFYKIISNEEGYRHICYFQIDKKDCTFITKGTWEVIGIEALTSDYLYYISNEYKGMPGGRNLYKIQLSDYTKVTCLSCELNPERCQYYSVSFSKEAKYYQLRCSGPGLPLYTLHSSVNDKGLRVLEDNSALDKMLQNVQMPSKKLDFIILNETKFWYQMILPPHFDKSKKYPLLLDVYAGPCSQKADTVFRLNWATYLASTENIIVASFDGRGSGYQGDKIMHAINRRLGTFEVEDQIEAARQFSKMGFVDNKRIAIWGWSYGGYVTSMVLGSGSGVFKCGIAVAPVSRWEYYDSVYTERYMGLPTPEDNLDHYRNSTVMSRAENFKQVEYLLIHGTADDNVHFQQSAQISKALVDVGVDFQAMWYTDEDHGIASSTAHQHIYTHMSHFIKQCFSLPEPKSCDKTHTCPPCPAPELLGGPSVFLFPPKPKDTLYITREPEVTCVVVDVSHEDPEVKFNWYVDGVEVHNAKTKPREEQYNSTYRVVSVLTVLHQDWLNGKEYKCKVSNKALPAPIEKTISKAKGQPREPQVYTLPPSRDELTKNQVSLTCLVKGFYPSDIAVEWESNGQPENNYKTTPPVLDSDGSFFLYSKLTVDKSRWQQGNVFSCSVMHEALHNHYTQKSLSLSPGK

SEQ ID NO: 357 - protein, 340 aa, Artificial Sequence
  derived and/or modified protein sequence (artificial) from Artificial____IL6R-Fc
LAPRRCPAQEVARGVLTSLPGDSVTLTCPGVEPEDNATVHWVLRKPAAGSHPSRWAGMGRRLLLRSVQLHDSGNYSCYRAGRPAGTVHLLVDVPPEEPQLSCFRKSPLSNVVCEWGPRSTPSLTTKAVLLVRKFQNSPAEDFQEPCQYSQESQKFSCQLAVPEGDSSFYIVSMCVASSVGSKFSKTQTFQGCGILQPDPPANITVTAVARNPRWLSVTWQDPHSWNSSFYRLRFELRYRAERSKTFTTWMVKDLQHHCVIHDAWSGLRHVVQLRAQEEFGQGEWSEWSPEAMGTPWTESRSPPAENEVSTPMQALTTNKDDDNILFRDSANATSLPVQDS

SEQ ID NO: 358 - protein, 498 aa, Artificial Sequence
  derived and/or modified protein sequence (artificial) from Artificial____PDGFRB-Fc
LVVTPPGPELVLNVSSTFVLTCSGSAPVVWERMSQEPPQEMAKAQDGTFSSVLTLTNLTGLDTGEYFCTHNDSRGLETDERKRLYIFVPDPTVGFLPNDAEELFIFLTEITEITIPCRVTDPQLVVTLHEKKGDVALPVPYDHQRGFSGIFEDRSYICKTTIGDREVDSDAYYVYRLQVSSINVSVNAVQTVVRQGENITLMCIVIGNEVVNFEWTYPRKESGRLVEPVTDFLLDMPYHIRSILHIPSAELEDSGTYTCNVTESVNDHQDEKAINITVVESGYVRLLGEVGTLQFAELHRSRTLQVVFEAYPPPTVLWFKDNRTLGDSSAGEIALSTRNVSETRYVSELTLVRVKVAEAGHYTMRAFHEDAEVQLSFQLQINVPVRVLELSESHPDSGEQTVRCRGRGMPQPNIIWSACRDLKRCPRELPPTLLGNSSEEESQLETNVTYWEEEQEFEVVSTLRLQHVDRPLSVRCTLRNAVGQDTQEVIVVPHSLPF

SEQ ID NO: 359 - protein, 216 aa, Artificial Sequence
  derived and/or modified protein sequence (artificial) from Artificial____TNFRSF10A-Fc
ASGTEAAAATPSKVWGSSAGRIEPRGGGRGALPTSMGQHGPSARARAGRAPGPRPAREASPRLRVHKTFKFVVVGVLLQVVPSSAATIKLHDQSIGTQQWEHSPLGELCPPGSHRSEHPGACNRCTEGVGYTNASNNLFACLPCTACKSDEEERSPCTTTRNTACQCKPGTFRNDNSAEMCRKCSRGCPRGMVKVKDCTPWSDIECVHKESGNGHN

SEQ ID NO: 360 - protein, 370 aa, Artificial Sequence
  derived and/or modified protein sequence (artificial) from Artificial____TNFRSF10B-Fc
ITQQDLAPQQRAAPQQKRSSPSEGLCPPGHHISEDGRDCISCKYGQDYSTHWNDLLFCLRCTRCDSGEVELSPCTTTRNTVCQCEEGTFREEDSPEMCRKCRTGCPRGMVKVGDCTPWSDIECVHKEGSSNTKVDKKVEPKSCDKTHTCPPCPAPELLGGPSVFLFPPKPKDTLMISRTPEVTCVVVDVSHEDPEVKFNWYVDGVEVHNAKTKPREEQYNSTYRVVSVLTVLHQDWLNGKEYKCKVSNKALPAPIEKTISKAKGQPREPQVYTLPPSRDELTKNQVSLTCLVKGFYPSDIAVEWESNGQPENNYKTTPPVLDSDGSFFLYSKLTVDKSRWQQGNVFSCSVMHEALHNHYTQKSLSLSPGK

SEQ ID NO: 361 - protein, 428 aa, Artificial Sequence
  derived and/or modified protein sequence (artificial) from Artificial____TNFRSF1A-Fc
IYPSGVIGLVPHLGDREKRDSVCPQGKYIHPQNNSICCTKCHKGTYLYNDCPGPGQDTDCRECESGSFTASENHLRHCLSCSKCRKEMGQVEISSCTVDRDTVCGCRKNQYRHYWSENLFQCFNCSLCLNGTVHLSCQEKQNTVCTCHAGFFLRENECVSCSNCKKSLECTKLCLPQIENVKGTEDSGIPKVDKKVEPKSCDKTHTCPPCPAPELLGGPSVFLFPPKPKDTLMISRTPEVTCVVVDVSHEDPEVKFNWYVDGVEVHNAKTKPREEQYNSTYRVVSVLTVLHQDWLNGKEYKCRVSNKALPAPIEKTISKAKGQPREPQVYTLPPSRDELTKNQVSLTCLVKGFYPSDIAVEWESNGQPENNYKTTPPVLDSDGSFFLYSKLTVDKSRWQQGNVFSCSVMHEALHNHYTQKSLSLSPGK

SEQ ID NO: 362 - protein, 471 aa, Artificial Sequence
  derived and/or modified protein sequence (artificial) from Artificial____TNFRSF1B -Fc
LPAQVAFTPYAPEPGSTCRLREYYDQTAQMCCSKCSPGQHAKVFCTKTSDTVCDSCEDSTYTQLWNWVPECLSCGSRCSSDQVETQACTREQNRICTCRPGWYCALSKQEGCRLCAPLRKCRPGFGVARPGTETSDVVCKPCAPGTFSNTTSSTDICRPHQICNVVAIPGNASMDAVCTSTSPTRSMAPGAVHLPQPVSTRSQHTQPTPEPSTAPSTSFLLPMGPSPPAEGIPKVDKKVEPKSCDKTHTCPPCPAPELLGGPSVFLFPPKPKDTLMISRTPEVTCVVVDVSHEDPEVKFNWYVDGVEVHNAKTKPREEQYNSTYRVVSVLTVLHQDWLNGKEYKCKVSNKALPAPIEKTISKAKGQPREPQVYTLPPSRDELTKNQVSLTCLVKGFYPSDIAVEWESNGQPENNYKTTPPVLDSDGSFFLYSKLTVDKSRWQQGNVFSCSVMHEALHNHYTQKSLSLSPGK

SEQ ID NO: 363 - protein, 588 aa, Artificial Sequence
  derived and/or modified protein sequence (artificial) from Artificial____UNC5B-Fc
GTDSGSEVLPDSFPSAPAEPLPYFLQEPQDAYIVKNKPVELRCRAFPATQIYFKCNGEWVSQNDHVTQEGLDEATGLRVREVQIEVSRQQVEELFGLEDYWCQCVAWSSAGTTKSRRAYVRIAYLRKNFDQEPLGKEVPLDHEVLLQCRPPEGVPVAEVEWLKNEDVIDPTQDTNFLLTIDHNLIIRQARLSDTANYTCVAKNIVAKRRSTTATVIVYVNGGWSSWAEWSPCSNRCGRGWQKRTRTCTNPAPLNGGAFCEGQAFQKTACTTICPVDGAWTEWSKWSACSTECAHWRSRECMAPPPQNGGRDCSGTLLDSKNCTDGLCMQNKKTLSDPNSHLLEASGDAALYIEGRMDPKSCDKTHTCPPCPAPELLGGPSVFLFPPKPKDTLMISRTPEVTCVVVDVSHEDPEVKFNWYVDGVEVHNAKTKPREEQYNSTYRVVSVLTVLHQDWLNGKEYKCKVSNKALPAPIEKTISKAKGQPREPQVYTLPPSRDELTKNQVSLTCLVKGFYPSDIAVEWESNGQPENNYKTTPPVLDSDGSFFLYSKLTVDKSRWQQGNVFSCSVMHEALHNHYTQKSLSLSPGK

SEQ ID NO: 364 - protein, 755 aa, Artificial Sequence
  derived and/or modified protein sequence (artificial) from Artificial____PDGFRB-trap(IgG4)
MRLPGAMPALALKGELLLLSLLLLLEPQISQGLVVTPPGPELVLNVSSTFVLTCSGSAPVVWERMSQEPPQEMAKAQDGTFSSVLTLTNLTGLDTGEYFCTHNDSRGLETDERKRLYIFVPDPTVGFLPNDAEELFIFLTEITEITIPCRVTDPQLVVTLHEKKGDVALPVPYDHQRGFSGIFEDRSYICKTTIGDREVDSDAYYVYRLQVSSINVSVNAVQTVVRQGENITLMCIVIGNEVVNFEWTYPRKESGRLVEPVTDFLLDMPYHIRSILHIPSAELEDSGTYTCNVTESVNDHQDEKAINITVVESGYVRLLGEVGTLQFAELHRSRTLQVVFEAYPPPTVLWFKDNRTLGDSSAGEIALSTRNVSETRYVSELTLVRVKVAEAGHYTMRAFHEDAEVQLSFQLQINVPVRVLELSESHPDSGEQTVRCRGRGMPQPNIIWSACRDLKRCPRELPPTLLGNSSEEESQLETNVTYWEEEQEFEVVSTLRLQHVDRPLSVRCTLRNAVGQDTQEVIVVPHSLPFKPPCPSCPAPEFLGGPSVFLFPPKPKDTLMISRTPEVTCVVVDVSQEDPEVQFNWYVDGVEVHNAKTKPREEQFNSTYRVVSVLTVLHQDWLNGKEYKCKVSNKGLPSSIEKTISKAKGQPREPQVYTLPPSQEEMTKNQVSLTCLVKGFYPSDIAVEWESNGQPENNYKTTPPVLDSDGSFFLYSRLTVDKSRWQEGNVFSCSVMHEALHNHYTQKSLSLSLGK

SEQ ID NO: 365 - protein, 765 aa, Artificial Sequence
  derived and/or modified protein sequence (artificial) from Artificial____PDGFRB-trap(IgG1)
MRLPGAMPALALKGELLLLSLLLLLEPQISQGLVVTPPGPELVLNVSSTFVLTCSGSAPVVWERMSQEPPQEMAKAQDGTFSSVLTLTNLTGLDTGEYFCTHNDSRGLETDERKRLYIFVPDPTVGFLPNDAEELFIFLTEITEITIPCRVTDPQLVVTLHEKKGDVALPVPYDHQRGFSGIFEDRSYICKTTIGDREVDSDAYYVYRLQVSSINVSVNAVQTVVRQGENITLMCIVIGNEVVNFEWTYPRKESGRLVEPVTDFLLDMPYHIRSILHIPSAELEDSGTYTCNVTESVNDHQDEKAINITVVESGYVRLLGEVGTLQFAELHRSRTLQVVFEAYPPPTVLWFKDNRTLGDSSAGEIALSTRNVSETRYVSELTLVRVKVAEAGHYTMRAFHEDAEVQLSFQLQINVPVRVLELSESHPDSGEQTVRCRGRGMPQPNIIWSACRDLKRCPRELPPTLLGNSSEEESQLETNVTYWEEEQEFEVVSTLRLQHVDRPLSVRCTLRNAVGQDTQEVIVVPHSLPFKDPEPKSCDKTHTCPPCPAPELLGGPSVFLFPPKPKDTLMISRTPEVTCVVVDVSHEDPEVKFNWYVDGVEVHNAKTKPREEQYNSTYRVVSVLTVLHQDWLNGKEYKCKVSNKALPAPIEKTISKAKGQPREPQVYTLPPSRDELTKNQVSLTCLVKGFYPSDIAVEWESNGQPENNYKTTPPVLDSDGSFFLYSKLTVDKSRWQQGNVFSCSVMHEALHNHYTQKSLSLSPGK

SEQ ID NO: 366 - DNA, 62 bp, Artificial Sequence
  5'-UTR of human peroxisomal multifunctional enzyme type 2 lacking the 5'-terminal oligopyrimidine tract (HSD17B4)
gtcccgcagtcggcgtccagcggctctgcttgttcgtgtgtgtgtcgttgcaggccttattc

SEQ ID NO: 367 - RNA, 62 nt, Artificial Sequence
  5'-UTR of human peroxisomal multifunctional enzyme type 2 lacking the 5'-terminal oligopyrimidine tract (HSD17B4) mRNA
gucccgcagucggcguccagcggcucugcuuguucgugugugugucguugcaggccuuauuc

SEQ ID NO: 368 - DNA, 42 bp, Artificial Sequence
  5'-UTR of human acid ceramidase lacking the 5'-terminal oligopyrimidine tract (ASAH1)
gcctctgctggagtccggggagtggcgttggctgctagagcg

SEQ ID NO: 369 - RNA, 42 nt, Artificial Sequence
  5'-UTR of human acid ceramidase lacking the 5'-terminal oligopyrimidine tract (ASAH1) mRNA
gccucugcuggaguccggggaguggcguuggcugcuagagcg

SEQ ID NO: 370 - DNA, 75 bp, Artificial Sequence
  5'-UTR of human mitochondrial ATP synthase subunit alpha lacking the 5'-terminal oligopyrimidine tract (ATP5A1)
gcggctcggccattttgtcccagtcagtccggaggctgcggctgcagaagtaccgcctgcggagtaactgcaaag

SEQ ID NO: 371 - RNA, 75 nt, Artificial Sequence
  5'-UTR of human mitochondrial ATP synthase subunit alpha lacking the 5'-terminal oligopyrimidine tract (ATP5A1) mRNA
gcggcucggccauuuugucccagucaguccggaggcugcggcugcagaaguaccgccugcggaguaacugcaaag

SEQ ID NO: 372 - DNA, 54 bp, Artificial Sequence
  5'-UTR of mouse RIKEN cDNA 2010107E04 gene (Mp68, 2010107E04Rik)
ctttcccattctgtagcagaatttggtgttgcctgtggtcttggtcccgcggag

SEQ ID NO: 373 - RNA, 54 nt, Artificial Sequence
  5'-UTR of mouse RIKEN cDNA 2010107E04 gene (Mp68, 2010107E04Rik) mRNA
cuuucccauucuguagcagaauuugguguugccuguggucuuggucccgcggag

SEQ ID NO: 374 - DNA, 81 bp, Artificial Sequence
  5'-UTR of mouse NADH dehydrogenase (ubiquinone) 1 alpha subcomplex, 4 (Ndufa4)
gtccgctcagccaggttgcagaagcggcttagcgtgtgtcctaatcttctctctgcgtgtaggtaggcctgtgccgcaaac

SEQ ID NO: 375 - RNA, 81 nt, Artificial Sequence
  5'-UTR of mouse NADH dehydrogenase (ubiquinone) 1 alpha subcomplex, 4 (Ndufa4) mRNA
guccgcucagccagguugcagaagcggcuuagcguguguccuaaucuucucucugcguguagguaggccugugccgcaaac

SEQ ID NO: 376 - DNA, 108 bp, Artificial Sequence
  5'-UTR of mouse nitric oxide synthase interacting protein (Nosip)
ctcctgtcgggcggaagtaggaggagtagagtttaaaaacagtactctttttccggttcgggacgtagttgaagcaacgacaagccggataaccgctcttgagacagg

SEQ ID NO: 377 - RNA, 108 nt, Artificial Sequence
  5'-UTR of mouse nitric oxide synthase interacting protein (Nosip) mRNA
cuccugucgggcggaaguaggaggaguagaguuuaaaaacaguacucuuuuuccgguucgggacguaguugaagcaacgacaagccggauaaccgcucuugagacagg

SEQ ID NO: 378 - DNA, 84 bp, Artificial Sequence
  5'-UTR of mouse ribosomal protein L31 (Rpl31)
cccgtgacccggaagttgtacggctacgcgactttccctcccacaaaccctcgcgcccttcctttcctacttgggcccggcaga

SEQ ID NO: 379 - RNA, 84 nt, Artificial Sequence
  5'-UTR of mouse ribosomal protein L31 (Rpl31) mRNA
cccgugacccggaaguuguacggcuacgcgacuuucccucccacaaacccucgcgcccuuccuuuccuacuugggcccggcaga

SEQ ID NO: 380 - DNA, 159 bp, Artificial Sequence
  5'-UTR of mouse solute carrier family 7 (cationic amino acid transporter, y+ system), member 3 (Slc7a3)
gggcgcttggcttgcaaggaccctgagctgcggcattgaagcacacccaacccaactcgactgaagtcagcctcactgaaccggatctgagaatcttctctctctgggcttgccagggctctccgaacctagctagcatcctcttcaattccaactaga

SEQ ID NO: 381 - RNA, 159 nt, Artificial Sequence
  5'-UTR of mouse solute carrier family 7 (cationic amino acid transporter, y+ system), member 3 (Slc7a3) mRNA
gggcgcuuggcuugcaaggacccugagcugcggcauugaagcacacccaacccaacucgacugaagucagccucacugaaccggaucugagaaucuucucucucugggcuugccagggcucuccgaaccuagcuagcauccucuucaauuccaacuaga

SEQ ID NO: 382 - DNA, 102 bp, Artificial Sequence
  5'-UTR of human tubulin beta 4B class Ivb (TUBB4B)
atataagcgttggcggagcgtcggttgtagcactctgcgcgcccgctcttctgctgctgtttgtctacttcctcctgcttccccgccgccgccgccgccatc

SEQ ID NO: 383 - RNA, 102 nt, Artificial Sequence
  5'-UTR of human tubulin beta 4B class Ivb (TUBB4B) mRNA
auauaagcguuggcggagcgucgguuguagcacucugcgcgcccgcucuucugcugcuguuugucuacuuccuccugcuuccccgccgccgccgccgccauc

SEQ ID NO: 384 - DNA, 222 bp, Artificial Sequence
  5'-UTR of mouse ubiquilin 2 (Ubqln2)
cggagacggcctgcaggacctgctctctcagccctcagccgaggcctacgccgagccgagtgcgcagccgacgaccgggaggagccgcagccttcaactctgaggtactgtgatccgcgctgcccgccgggccgccccagtccgctgctgcggcacctccttccctcgcgccctcttcgctcgccagcgccttccctgtgagcctgcgtcaccgcggccgcc

SEQ ID NO: 385 - RNA, 222 nt, Artificial Sequence
  5'-UTR of mouse ubiquilin 2 (Ubqln2)  mRNA
cggagacggccugcaggaccugcucucucagcccucagccgaggccuacgccgagccgagugcgcagccgacgaccgggaggagccgcagccuucaacucugagguacugugauccgcgcugcccgccgggccgccccaguccgcugcugcggcaccuccuucccucgcgcccucuucgcucgccagcgccuucccugugagccugcgucaccgcggccgcc

SEQ ID NO: 386 - DNA, 42 bp, Artificial Sequence
  5'-UTR of human ribosomal protein Large 32 lacking the 5'-terminal oligopyrimidine tract (RPL32, 32L4)
ggcgctgcctacggaggtggcagccatctccttctcggcatc

SEQ ID NO: 387 - RNA, 42 nt, Artificial Sequence
  5'-UTR of human ribosomal protein Large 32 lacking the 5'-terminal oligopyrimidine tract (RPL32, 32L4) mRNA
ggcgcugccuacggagguggcagccaucuccuucucggcauc

SEQ ID NO: 388 - DNA, 57 bp, Artificial Sequence
  3'-UTR of human proteasome subunit beta 3 (PSMB3)
ccctgttcccagagcccacttttttttctttttttgaaataaaatagcctgtctttc

SEQ ID NO: 389 - RNA, 57 nt, Artificial Sequence
  3'-UTR of human proteasome subunit beta 3 (PSMB3) mRNA
cccuguucccagagcccacuuuuuuuucuuuuuuugaaauaaaauagccugucuuuc

SEQ ID NO: 390 - DNA, 121 bp, Artificial Sequence
  3'-UTR of human caspase 1 (CASP1)
aataaggaaactgtatgaatgtctgtgggcaggaagtgaagagatccttctgtaaaggtttttggaattatgtctgctgaataataaacttttttgaaataataaatctggtagaaaaatg

SEQ ID NO: 391 - RNA, 121 nt, Artificial Sequence
  3'-UTR of human caspase 1 (CASP1) mRNA
aauaaggaaacuguaugaaugucugugggcaggaagugaagagauccuucuguaaagguuuuuggaauuaugucugcugaauaauaaacuuuuuugaaauaauaaaucugguagaaaaaug

SEQ ID NO: 392 - DNA, 137 bp, Artificial Sequence
  3'-UTR of human cytochrome c oxidase subunit 6B1 (COX6B1)
actggctgcatctccctttcctctgtcctccatccttctcccaggatggtgaagggggacctggtacccagtgatccccaccccaggatcctaaatcatgacttacctgctaataaaaactcattggaaaagtgaga

SEQ ID NO: 393 - RNA, 137 nt, Artificial Sequence
  3'-UTR of human cytochrome c oxidase subunit 6B1 (COX6B1) mRNA
acuggcugcaucucccuuuccucuguccuccauccuucucccaggauggugaagggggaccugguacccagugauccccaccccaggauccuaaaucaugacuuaccugcuaauaaaaacucauuggaaaagugaga

SEQ ID NO: 394 - DNA, 353 bp, Artificial Sequence
  3'-UTR of mouse GNAS (guanine nucleotide binding protein, alpha stimulating) complex locus (Gnas)
gaagggaacacccaaatttaattcagccttaagcacaattaattaagagtgaaacgtaattgtacaagcagttggtcacccaccatagggcatgatcaacaccgcaacctttcctttttcccccagtgattctgaaaaacccctcttcccttcagcttgcttagatgttccaaatttagtaagcttaaggcggcctacagaagaaaaagaaaaaaaaggccacaaaagttccctctcactttcagtaaataaaataaaagcagcaacagaaataaagaaataaatgaaattcaaaatgaaataaatattgtgttgtgcagcattaaaaaatcaataaaaattaaaaatgagca

SEQ ID NO: 395 - RNA, 353 nt, Artificial Sequence
  3'-UTR of mouse GNAS (guanine nucleotide binding protein, alpha stimulating) complex locus (Gnas) mRNA
gaagggaacacccaaauuuaauucagccuuaagcacaauuaauuaagagugaaacguaauuguacaagcaguuggucacccaccauagggcaugaucaacaccgcaaccuuuccuuuuucccccagugauucugaaaaaccccucuucccuucagcuugcuuagauguuccaaauuuaguaagcuuaaggcggccuacagaagaaaaagaaaaaaaaggccacaaaaguucccucucacuuucaguaaauaaaauaaaagcagcaacagaaauaaagaaauaaaugaaauucaaaaugaaauaaauauuguguugugcagcauuaaaaaaucaauaaaaauuaaaaaugagca

SEQ ID NO: 396 - DNA, 133 bp, Artificial Sequence
  3'-UTR of mouse NADH dehydrogenase (ubiquinone) 1 alpha subcomplex, 1 (Ndufa1)
ggaagcattttcctggctgattaaaagaaattactcagctatggtcatctgttcctgttagaaggctatgcagcatattatatactatgcgcatgttatgaaatgcataataaaaaattttaaaaaatctaaa

SEQ ID NO: 397 - RNA, 133 nt, Artificial Sequence
  3'-UTR of mouse NADH dehydrogenase (ubiquinone) 1 alpha subcomplex, 1 (Ndufa1) mRNA
ggaagcauuuuccuggcugauuaaaagaaauuacucagcuauggucaucuguuccuguuagaaggcuaugcagcauauuauauacuaugcgcauguuaugaaaugcauaauaaaaaauuuuaaaaaaucuaaa

SEQ ID NO: 398 - DNA, 70 bp, Artificial Sequence
  3'-UTR of human ribosomal protein S9 (RPS9)
gtccacctgtccctcctgggctgctggattgtctcgttttcctgccaaataaacaggatcagcgctttac

SEQ ID NO: 399 - RNA, 70 nt, Artificial Sequence
  3'-UTR of human ribosomal protein S9 (RPS9) mRNA
guccaccugucccuccugggcugcuggauugucucguuuuccugccaaauaaacaggaucagcgcuuuac

SEQ ID NO: 400 - DNA, 187 bp, Artificial Sequence
  3'-UTR ALB7
gcatcacatttaaaagcatctcagcctaccatgagaataagagaaagaaaatgaagatcaatagcttattcatctctttttctttttcgttggtgtaaagccaacaccctgtctaaaaaacataaatttctttaatcattttgcctcttttctctgtgcttcaattaataaaaaatggaaagaacct

SEQ ID NO: 401 - RNA, 187 nt, Artificial Sequence
  3'-UTR ALB7 mRNA
gcaucacauuuaaaagcaucucagccuaccaugagaauaagagaaagaaaaugaagaucaauagcuuauucaucucuuuuucuuuuucguugguguaaagccaacacccugucuaaaaaacauaaauuucuuuaaucauuuugccucuuuucucugugcuucaauuaauaaaaaauggaaagaaccu

SEQ ID NO: 402 - DNA, 44 bp, Artificial Sequence
  Center, alpha-complex-binding portion of the 3'-UTR of an alpha-globin gene (muag)
gcccgatgggcctcccaacgggccctcctcccctccttgcaccg

SEQ ID NO: 403 - RNA, 44 nt, Artificial Sequence
  Center, alpha-complex-binding portion of the 3'-UTR of an alpha-globin gene (muag) mRNA
gcccgaugggccucccaacgggcccuccuccccuccuugcaccg

SEQ ID NO: 404 - DNA, 24 bp, Artificial Sequence
  histone stem-loop sequence (histoneSL, hSL)
caaaggctcttttcagagccacca

SEQ ID NO: 405 - RNA, 24 nt, Artificial Sequence
  histone stem-loop sequence (histoneSL, hSL) mRNA
caaaggcucuuuucagagccacca

SEQ ID NO: 406 - DNA, 13 bp, Artificial Sequence
  Kozak
gccgccaccatgg

SEQ ID NO: 407 - RNA, 13 nt, Artificial Sequence
  Kozak mRNA
gccgccaccaugg

SEQ ID NO: 408 - RNA, 6 nt, Artificial Sequence
  mRNA 5'-end
gggaga

SEQ ID NO: 409 - RNA, 6 nt, Artificial Sequence
  mRNA 5'-end
aggaga

SEQ ID NO: 410 - RNA, 99 nt, Artificial Sequence
  mRNA 3'-end A75-histoneSL
aaaaaaaaaaaaaaaaaaaaaaaaaaaaaaaaaaaaaaaaaaaaaaaaaaaaaaaaaaaaaaaaaaaaaaaaaaacaaaggcucuuuucagagccacca

SEQ ID NO: 411 - RNA, 102 nt, Artificial Sequence
  mRNA 3'-end U3-A75-histoneSL
uuuaaaaaaaaaaaaaaaaaaaaaaaaaaaaaaaaaaaaaaaaaaaaaaaaaaaaaaaaaaaaaaaaaaaaaaaaaaacaaaggcucuuuucagagccacca

SEQ ID NO: 412 - RNA, 178 nt, Artificial Sequence
  mRNA 3'-end A154-histoneSL
aaaaaaaaaaaaaaaaaaaaaaaaaaaaaaaaaaaaaaaaaaaaaaaaaaaaaaaaaaaaaaaaaaaaaaaaaaaaaaaaaaaaaaaaaaaaaaaaaaaaaaaaaaaaaaaaaaaaaaaaaaaaaaaaaaaaaaaaaaaaaaaaaaaaaaaaaacaaaggcucuuuucagagccacca

SEQ ID NO: 413 - RNA, 181 nt, Artificial Sequence
  mRNA 3'-end U3-A154-histoneSL
uuuaaaaaaaaaaaaaaaaaaaaaaaaaaaaaaaaaaaaaaaaaaaaaaaaaaaaaaaaaaaaaaaaaaaaaaaaaaaaaaaaaaaaaaaaaaaaaaaaaaaaaaaaaaaaaaaaaaaaaaaaaaaaaaaaaaaaaaaaaaaaaaaaaaaaaaaaaacaaaggcucuuuucagagccacca

SEQ ID NO: 414 - RNA, 101 nt, Artificial Sequence
  mRNA 3'-end N2-A75-histoneSL
agaaaaaaaaaaaaaaaaaaaaaaaaaaaaaaaaaaaaaaaaaaaaaaaaaaaaaaaaaaaaaaaaaaaaaaaaaaacaaaggcucuuuucagagccacca

SEQ ID NO: 415 - RNA, 99 nt, Artificial Sequence
  mRNA 3'-end histoneSL-A75
caaaggcucuuuucagagccaccaaaaaaaaaaaaaaaaaaaaaaaaaaaaaaaaaaaaaaaaaaaaaaaaaaaaaaaaaaaaaaaaaaaaaaaaaaaa

SEQ ID NO: 416 - RNA, 124 nt, Artificial Sequence
  mRNA 3'-end histoneSL-A100
caaaggcucuuuucagagccaccaaaaaaaaaaaaaaaaaaaaaaaaaaaaaaaaaaaaaaaaaaaaaaaaaaaaaaaaaaaaaaaaaaaaaaaaaaaaaaaaaaaaaaaaaaaaaaaaaaaaa

SEQ ID NO: 417 - RNA, 170 nt, Artificial Sequence
  mRNA 3'-end histoneSL-A146
caaaggcucuuuucagagccaccaaaaaaaaaaaaaaaaaaaaaaaaaaaaaaaaaaaaaaaaaaaaaaaaaaaaaaaaaaaaaaaaaaaaaaaaaaaaaaaaaaaaaaaaaaaaaaaaaaaaaaaaaaaaaaaaaaaaaaaaaaaaaaaaaaaaaaaaaaaaaaaaaaa

SEQ ID NO: 418 - RNA, 136 nt, Artificial Sequence
  mRNA 3'-end N8-A64-N5-C30-histoneSL-N5
agauuaauaaaaaaaaaaaaaaaaaaaaaaaaaaaaaaaaaaaaaaaaaaaaaaaaaaaaaaaaaaaaaaaaugcaucccccccccccccccccccccccccccccccaaaggcucuuuucagagccaccagaauu

SEQ ID NO: 419 - RNA, 131 nt, Artificial Sequence
  mRNA 3'-end N8-A64-N5-C30-histoneSL
agauuaauaaaaaaaaaaaaaaaaaaaaaaaaaaaaaaaaaaaaaaaaaaaaaaaaaaaaaaaaaaaaaaaaugcaucccccccccccccccccccccccccccccccaaaggcucuuuucagagccacca

SEQ ID NO: 420 - RNA, 105 nt, Artificial Sequence
  mRNA 3'-end N8-A64-N5-C4-histoneSL
agauuaauaaaaaaaaaaaaaaaaaaaaaaaaaaaaaaaaaaaaaaaaaaaaaaaaaaaaaaaaaaaaaaaaugcaucccccaaaggcucuuuucagagccacca

SEQ ID NO: 421 - RNA, 115 nt, Artificial Sequence
  mRNA 3'-end N8-A64-N5-C14-histoneSL
agauuaauaaaaaaaaaaaaaaaaaaaaaaaaaaaaaaaaaaaaaaaaaaaaaaaaaaaaaaaaaaaaaaaaugcaucccccccccccccccaaaggcucuuuucagagccacca

SEQ ID NO: 422 - RNA, 134 nt, Artificial Sequence
  mRNA 3'-end N6-A64-N5-C30-histoneSL-N5
agaucuaaaaaaaaaaaaaaaaaaaaaaaaaaaaaaaaaaaaaaaaaaaaaaaaaaaaaaaaaaaaaaaaugcaucccccccccccccccccccccccccccccccaaaggcucuuuucagagccaccagaauu

SEQ ID NO: 423 - RNA, 129 nt, Artificial Sequence
  mRNA 3'-end N6-A64-N5-C30-histoneSL
agaucuaaaaaaaaaaaaaaaaaaaaaaaaaaaaaaaaaaaaaaaaaaaaaaaaaaaaaaaaaaaaaaaaugcaucccccccccccccccccccccccccccccccaaaggcucuuuucagagccacca

SEQ ID NO: 424 - RNA, 103 nt, Artificial Sequence
  mRNA 3'-end N6-A64-N5-C4-histoneSL
agaucuaaaaaaaaaaaaaaaaaaaaaaaaaaaaaaaaaaaaaaaaaaaaaaaaaaaaaaaaaaaaaaaaugcaucccccaaaggcucuuuucagagccacca

SEQ ID NO: 425 - RNA, 113 nt, Artificial Sequence
  mRNA 3'-end N6-A64-N5-C14-histoneSL
agaucuaaaaaaaaaaaaaaaaaaaaaaaaaaaaaaaaaaaaaaaaaaaaaaaaaaaaaaaaaaaaaaaaugcaucccccccccccccccaaaggcucuuuucagagccacca

SEQ ID NO: 426 - RNA, 99 nt, Artificial Sequence
  mRNA 3'-end N6-A64-histoneSL-N5
agaucuaaaaaaaaaaaaaaaaaaaaaaaaaaaaaaaaaaaaaaaaaaaaaaaaaaaaaaaaaaaaaaaacaaaggcucuuuucagagccaccagaauu

SEQ ID NO: 427 - RNA, 128 nt, Artificial Sequence
  mRNA 3'-end A64-N5-C30-histoneSL-N5
aaaaaaaaaaaaaaaaaaaaaaaaaaaaaaaaaaaaaaaaaaaaaaaaaaaaaaaaaaaaaaaaugcaucccccccccccccccccccccccccccccccaaaggcucuuuucagagccaccagaauu

SEQ ID NO: 428 - RNA, 123 nt, Artificial Sequence
  mRNA 3'-end A64-N5-C30-histoneSL
aaaaaaaaaaaaaaaaaaaaaaaaaaaaaaaaaaaaaaaaaaaaaaaaaaaaaaaaaaaaaaaaugcaucccccccccccccccccccccccccccccccaaaggcucuuuucagagccacca

SEQ ID NO: 429 - RNA, 97 nt, Artificial Sequence
  mRNA 3'-end A64-N5-C4-histoneSL
aaaaaaaaaaaaaaaaaaaaaaaaaaaaaaaaaaaaaaaaaaaaaaaaaaaaaaaaaaaaaaaaugcaucccccaaaggcucuuuucagagccacca

SEQ ID NO: 430 - RNA, 107 nt, Artificial Sequence
  mRNA 3'-end A64-N5-C14-histoneSL
aaaaaaaaaaaaaaaaaaaaaaaaaaaaaaaaaaaaaaaaaaaaaaaaaaaaaaaaaaaaaaaaugcaucccccccccccccccaaaggcucuuuucagagccacca

SEQ ID NO: 431 - RNA, 93 nt, Artificial Sequence
  mRNA 3'-end A64-histoneSL-N5
aaaaaaaaaaaaaaaaaaaaaaaaaaaaaaaaaaaaaaaaaaaaaaaaaaaaaaaaaaaaaaaacaaaggcucuuuucagagccaccagaauu

SEQ ID NO: 432 - protein, 14 aa, Artificial Sequence
  derived and/or modified protein sequence (artificial) from Artificial____CR12C
CRRRRRRRRRRRRC

SEQ ID NO: 433 - protein, 13 aa, Artificial Sequence
  derived and/or modified protein sequence (artificial) from Artificial____CR12
CRRRRRRRRRRRR

SEQ ID NO: 434 - protein, 14 aa, Artificial Sequence
  derived and/or modified protein sequence (artificial) from Artificial____W peptide
WRRRRRRRRRRRRC

SEQ ID NO: 435 - protein, 18 aa, Artificial Sequence
  derived and/or modified protein sequence (artificial) from Artificial____PB83
CHHHHHHRRRRHHHHHHC

SEQ ID NO: 436 - protein, 771 aa, Artificial Sequence [sequence omitted]

SEQ ID NO: 437 - protein, 18 aa, Artificial Sequence
  derived and/or modified protein sequence (artificial) from Artificial____CGH5R4H5GC
CGHHHHHRRRRHHHHHGC

SEQ ID NO: 438 - RNA, 1227 nt, Artificial Sequence
  Rp_iRFP682(GC)
aggagagucccgcagucggcguccagcggcucugcuuguucgugugugugucguugcaggccuuauucaagcuuaccauggccgagggcagcguggcccgccagcccgaccugcugaccugcgacgacgagccgauccacauccccggggcgauccagccccacggccuccugcucgcccuggccgccgacaugaccaucgucgccggguccgacaaccugcccgagcucacgggccuggcgaucggggcccugaucggccggagcgccgccgacguguucgacuccgagacccacaaccgccucaccaucgcgcuggccgagccgggcgccgccgugggggcccccaucaccgucggcuucacgaugcggaaggacgcgggguucaucggcagcuggcaccgccacgaccagcugaucuuccucgagcuggagccgccccagcgggacguggccgagccccaggccuucuuccgccggaccaacuccgccauccgccggcugcaggccgcggagacccucgagagcgccugcgccgccgccgcgcaggaggugcgcaagaucaccggguucgaccgggucaugaucuaccgcuucgccuccgacuucagcggcguggugaucgccgaggaccggugcgccgaggucgaguccaagcugggccugcacuaccccgccagcgcggugcccgcccaggcccgccggcucuacacgaucaaccccgugcgcaucaucccggacaucaacuaccggcccguccccgugacccccgaccugaacccggugaccgggcgccccaucgaccuguccuucgccauccuccggagcgucucccccugccaccuggaguucaugcgcaacaucggcaugcacgggaccaugagcaucuccauccugcggggcgagcgccucuggggccugaucgugugccaccaccgcacgcccuacuacguggaccuggacgggcggcaggcgugcgagcucgucgcccaggugcuggccuggcagaucggcgugauggaggagugaggacuagucccuguucccagagcccacuuuuuuuucuuuuuuugaaauaaaauagccugucuuucagaucuaaaaaaaaaaaaaaaaaaaaaaaaaaaaaaaaaaaaaaaaaaaaaaaaaaaaaaaaaaaaaaaaugcaucccccccccccccccccccccccccccccccaaaggcucuuuucagagccaccagaauu
